(19) United States
(12) Patent Application Publication
(10) Pub. No.: US 2009/0297495 A1
(43) Pub. Date: Dec. 3, 2009

(54) HYDROLASES, NUCLEIC ACIDS ENCODING THEM AND METHODS FOR IMPROVING PAPER STRENGTH

(75) Inventors: Janne S. Kerovuo, San Diego, CA (US); Ryan McCann, San Diego, CA (US); David Weiner, Del Mar, CA (US); Arne I. Solbak, JR., San Diego, CA (US)

Correspondence Address: VERENIUM C/O MOFO S.D., 12531 HIGH BLUFF DRIVE, SUITE 100, SAN DIEGO, CA, 92130-2040, US

(73) Assignee: Verenium Corporation

(21) Appl. No.: 11/817,865

(22) PCT Filed: Mar. 8, 2006
(86) PCT No.: PCT/US06/08555

§ 371 Date: May 12, 2008

Related U.S. Application Data
(60) Provisional application No. 60/660,122, filed on Mar. 8, 2005.

(51) Int. Cl. A61K 38/46; C07H 21/00; C12P 19/34; C12N 15/63; C12N 1/21; C12N 5/00; C12N 1/15; C12N 5/06; C12N 5/04; C12N 1/19; A01K 67/027; A01H 5/00; A01H 5/10; C12N 9/16; C12N 9/48; C12P 21/00; C07K 1/107; C07H 1/00; C12P 7/64; C12N 9/14; C12P 7/52; C12P 7/62; C12P 7/00; D06M 16/00; B32B 5/02; D21H 17/22; A61P 43/00; A23C 9/12; A23L 1/48; C11D 7/42; C12S 11/00; C12S 9/00

(52) U.S. Cl. 424/94.6; 536/23.2; 536/24.3; 536/24.33; 435/91.2; 435/320.1; 435/252.3; 435/325; 435/254.11; 435/348; 435/419; 435/254.2; 435/417; 435/412; 435/414; 800/18; 800/320.1; 800/320; 800/317.2; 800/317.4; 800/320.3; 800/298; 800/312; 800/320.2; 800/317.3; 800/322; 435/196; 435/212; 435/69.1; 530/402; 536/55.3; 435/134; 435/195; 435/264; 435/141; 435/135; 435/132; 435/263; 442/59; 162/174; 426/61; 510/392; 510/320

(57) ABSTRACT

The invention provides hydrolases, polynucleotides encoding them, and methods of making and using these polynucleotides and polypeptides. In one aspect, the invention is directed to polypeptides, e.g., enzymes, having a hydrolase activity, e.g., an esterase, acylase, lipase, phospholipase (e.g., phospholipase A, B, C and D activity, patatin activity, lipid acyl hydrolase (LAH) activity) or protease activity, including thermostable and thermotolerant hydrolase activity, and polynucleotides encoding these enzymes, and making and using these polynucleotides and polypeptides. The hydrolase activities of the polypeptides and peptides of the invention include esterase activity, lipase activity (hydrolysis of lipids), acidolysis reactions (to replace an esterified fatty acid with a free fatty acid), transesterification reactions (exchange of fatty acids between triglycerides), ester synthesis, ester interchange reactions, phospholipase activity and protease activity (hydrolysis of peptide bonds). In another aspect, the invention provides methods for hydrolyzing steryl esters and triglycerides (e.g., in a paper pulp), into sterols, glycerol and free fatty acids, using enzyme(s) of the invention. The invention provides enzymes and methods for decreasing the amount of lipophilic extracts (“pitch”) in a pulp-comprising composition. The polypeptides of the invention can be used in a variety of pharmaceutical, agricultural and industrial contexts, including the manufacture of cosmetics and nutraceuticals.

### REFERENCE TO SEQUENCE LISTING SUBMITTED ON A COMPACT DISC

[0001] The content of the following submission on compact discs is incorporated herein by reference in its entirety: A computer readable form (CRF) of the Sequence Listing on compact disc (file name: 564462013940, date recorded: Mar. 7, 2006, size: 2,310,144 bytes); a triplicate compact disc copy of the Sequence Listing (COPY 1) (file name: 564462013940, date recorded: Mar. 7, 2006, size: 2,310,144 bytes); a triplicate compact disc copy of the Sequence Listing (COPY 2) (file name: 564462013940, date recorded: Mar. 7, 2006, size: 2,310,144 bytes); and a triplicate compact disc copy of the Sequence Listing (COPY 3) (file name: 564462013940, date recorded: Mar. 7, 2006, size: 2,310,144 bytes).

### TECHNICAL FIELD

[0002] This invention relates to molecular and cellular biology and biochemistry. In one aspect, the invention provides hydrolases, polynucleotides encoding them, and methods of making and using these polynucleotides and polypeptides. In one aspect, the invention is directed to polypeptides, e.g., enzymes, having a hydrolase activity, e.g., an esterase, acylase, lipase, phospholipase or protease activity, including thermostable and thermotolerant hydrolase activity, and polynucleotides encoding these enzymes, and making and using these polynucleotides and polypeptides. The hydrolase activities of the polypeptides and peptides of the invention include esterase activity, lipase activity (hydrolysis of lipids), acidolysis reactions (to replace an esterified fatty acid with a free fatty acid), transesterification reactions (exchange of fatty acids between triglycerides), ester synthesis, ester interchange reactions, phospholipase activity (e.g., phospholipase A, B, C and D activity, patatin activity, lipid acyl hydrolase (LAH) activity) and protease activity (hydrolysis of peptide bonds). The polypeptides of the invention can be used in a variety of pharmaceutical, agricultural and industrial contexts, including the manufacture of cosmetics and nutraceuticals. In another aspect, the polypeptides of the invention are used to synthesize enantiomerically pure chiral products.

[0003] In one aspect, the polypeptides of the invention are used in the biocatalytic synthesis of structured lipids (lipids that contain a defined set of fatty acids distributed in a defined manner on the glycerol backbone), including cocoa butter alternatives (CBA), lipids containing poly-unsaturated fatty acids (PUFAs), diacylglycerides, e.g., 1,3-diacyl glycerides (DAGs), monoglycerides, e.g., 2-monoglycerides (MAGs) and triacylglycerides (TAGs). In one aspect, the polypeptides of the invention are used to modify oils, such as fish, animal and vegetable oils, and lipids, such as poly-unsaturated fatty acids. The hydrolases of the invention having lipase activity can modify oils by hydrolysis, alcoholysis, esterification, transesterification and/or interesterification. The methods of the invention can use lipases with defined regio-specificity or defined chemoselectivity in biocatalytic synthetic reactions.

[0004] Additionally, the polypeptides of the invention can be used in food processing, brewing, bath additives, alcohol production, peptide synthesis, enantioselectivity, hide preparation in the leather industry, waste management and animal degradation, silver recovery in the photographic industry, medical treatment, silk degumming, biofilm degradation, biomass conversion to ethanol, biodefense, antimicrobial agents and disinfectants, personal care and cosmetics, biotech reagents, in increasing starch yield from corn wet milling and pharmaceuticals such as digestive aids and anti-inflammatory (anti-phlogistic) agents.

### BACKGROUND

[0005] The major industrial applications for hydrolases, e.g., esterases, lipases, phospholipases and proteases, include the detergent industry, where they are employed to decompose fatty materials in laundry stains into easily removable hydrophilic substances; the food and beverage industry where they are used in the manufacture of cheese, the ripening and flavoring of cheese, as antistaling agents for bakery products, and in the production of margarine and other spreads with natural butter flavors; in waste systems; and in the pharmaceutical industry where they are used as digestive aids.

[0006] Oils and fats an important renewable raw material for the chemical industry. They are available in large quantities from the processing of oilseeds from plants like rice bran oil, rapeseed (canola), sunflower, olive, palm or soy. Other sources of valuable oils and fats include fish, restaurant waste, and rendered animal fats. These fats and oils are a mixture of triglycerides or lipids, i.e. fatty acids (FAs) esterified on a glycerol scaffold. Each oil or fat contains a wide variety of different lipid structures, defined by the FA content and their regiochemical distribution on the glycerol backbone. These properties of the individual lipids determine the physical properties of the pure triglyceride. Hence, the triglyceride content of a fat or oil to a large extent determines the physical, chemical and biological properties of the oil. The value of lipids increases greatly as a function of their purity. High purity can be achieved by fractional chromatography or distillation, separating the desired triglyceride from the mixed background of the fat or oil source. However, this is costly and yields are often limited by the low levels at which the triglyceride occurs naturally. In addition, the purity of the product is often compromised by the presence of many structurally and physically or chemically similar triglycerides in the oil.

[0007] An alternative to purifying triglycerides or other lipids from a natural source is to synthesize the lipids. The products of such processes are called structured lipids because they contain a defined set of fatty acids distributed in a defined manner on the glycerol backbone. The value of lipids also increases greatly by controlling the fatty acid content and distribution within the lipid. Lipases can be used to affect such control.

[0008] Phospholipases are enzymes that hydrolyze the ester bonds of phospholipids. Corresponding to their importance in the metabolism of phospholipids, these enzymes are widespread among prokaryotes and eukaryotes. The phospholipases affect the metabolism, construction and reorganization of biological membranes and are involved in signal cascades. Several types of phospholipases are known which differ in their specificity according to the position of the bond attacked in the phospholipid molecule. Phospholipase A1 (PLA1) removes the 1-position fatty acid to produce free fatty acid and 1-lyso-2-acylphospholipid. Phospholipase A2 (PLA2) removes the 2-position fatty acid to produce free fatty acid and 1-acyl-2-lysophospholipid. PLA1 and PLA2 enzymes can be intra- or extra-cellular, membrane-bound or soluble. Intracellular PLA2 is found in almost every mammalian cell. Phospholipase C (PLC) removes the phosphate moiety to produce 1,2 diacylglycerol and phospho base. Phospholipase D (PLD) produces 1,2-diacylglycerophosphate and base group. PLC and PLD are important in cell function and signaling. Patatins are another type of phospholipase thought to work as a PLA.

[0009] In general, enzymes, including hydrolases such as esterases, lipases and proteases, are active over a narrow range of environmental conditions (temperature, pH, etc.), and many are highly specific for particular substrates. The narrow range of activity for a given enzyme limits its applicability and creates a need for a selection of enzymes that (a) have similar activities but are active under different conditions or (b) have different substrates. For instance, an enzyme capable of catalyzing a reaction at 50° C. may be so inefficient at 35° C., that its use at the lower temperature will not be feasible. For this reason, laundry detergents generally contain a selection of proteolytic enzymes, allowing the detergent to be used over a broad range of wash temperature and pH. In view of the specificity of enzymes and the growing use of hydrolases in industry, research, and medicine, there is an ongoing need in the art for new enzymes and new enzyme inhibitors.

[0010] Wood pulp is made in several stages. First the bark is removed from the wood. This can be done with or without water (wet stripping). The bark is generally recovered to use as fuel in the pulp and paper making process. The cellulose fibers that keep the wood together are then separated. This can be done in a number of ways. For example, the wood can be crushed with grinders and then soaked in water to produce groundwood. Mechanical pulps are used for products that require less strength, such as newsprint and paperboards. Alternatively, the wood can be crushed with refiners using steam at high pressures and temperatures to produce thermomechanical pulp, which differs in quality from groundwood. Chemicals can be used to break up the cellulose fibers. Pulp produced this way is known as chemi-thermomechanical pulp. Alternatively, chemical pulp is produced by combining wood chips and chemicals in vats (digesters). The effect of the heat and the chemicals dissolves the lignin that binds the cellulose fibers together without breaking the wood fibers. The fluid containing lignin and other dissolved material is dried and used as fuel. Chemical pulps include kraft pulp (or sulphate pulp).

### SUMMARY

[0011] The invention provides polypeptides, for example, enzymes and catalytic antibodies, having a hydrolase activity, e.g., an esterase, acylase, lipase, phospholipase or protease activity, including thermostable and thermotolerant hydrolase activities, and enantiospecific activities, and polynucleotides encoding these polypeptides, including vectors, host cells, transgenic plants and non-human animals, and methods for making and using these polynucleotides and polypeptides.

[0012] The invention provides isolated or recombinant nucleic acids comprising a nucleic acid sequence having at least about 50%, 51%, 52%, 53%, 54%, 55%, 56%, 57%, 58%, 59%, 60%, 61%, 62%, 63%, 64%, 65%, 66%, 67%, 68%, 69%, 70%, 71%, 72%, 73%, 74%, 75%, 76%, 77%, 78%, 79%, 80%, 81%, 82%, 83%, 84%, 85%, 86%, 87%, 88%, 89%, 90%, 91%, 92%, 93%, 94%, 95%, 96%, 97%, 98%, 99%, or more, or complete (100%) sequence identity to an exemplary nucleic acid of the invention over a region of at least about 10, 15, 20, 25, 30, 35, 40, 45, 50, 55, 60, 65, 70, 75, 100, 125, 150, 175, 200, 250, 300, 350, 400, 450, 500, 550, 600, 650, 700, 750, 800, 850, 900, 950, 1000, 1050, 1100, 1150, 1200, 1250, 1300, 1350, 1400, 1450, 1500, 1550 or more, residues, wherein the nucleic acid encodes at least one polypeptide having a hydrolase activity, e.g., an esterase, acylase, lipase, phospholipase or protease activity. The sequence identities can be determined by analysis with a sequence comparison algorithm or by a visual inspection. Exemplary nucleic acids of the invention include all the sequences set forth in the computer readable form (CRF) of the Sequence Listing, and include isolated or recombinant nucleic acids comprising a nucleic acid sequence as set forth in SEQ ID NO:1, SEQ ID NO:3, SEQ ID NO:5, SEQ ID NO:7, SEQ ID NO:9, SEQ ID NO:11, SEQ ID NO:13, SEQ ID NO:15, SEQ ID NO:17, SEQ ID NO:19, SEQ ID NO:21, SEQ ID NO:23, SEQ ID NO:25, SEQ ID NO:27, SEQ ID NO:29, SEQ ID NO:31, SEQ ID NO:33, SEQ ID NO:35, SEQ ID NO:37, SEQ ID NO:39, SEQ ID NO:41, SEQ ID NO:43, SEQ ID NO:45, SEQ ID NO:47, SEQ ID NO:49, SEQ ID NO:51, SEQ ID NO:53, SEQ ID NO:55, SEQ ID NO:57, SEQ ID NO:59, SEQ ID NO:61, SEQ ID NO:63, SEQ ID NO:65, SEQ ID NO:67, SEQ ID NO:69, SEQ ID NO:71, SEQ ID NO:73, SEQ ID NO:75, SEQ ID NO:77, SEQ ID NO:79, SEQ ID NO:81, SEQ ID NO:83, SEQ ID NO:85, SEQ ID NO:87, SEQ ID NO:89, SEQ ID NO:91, SEQ ID NO:93, SEQ ID NO:95, SEQ ID NO:97, SEQ ID NO:99, SEQ ID NO:101, SEQ ID NO:103, SEQ ID NO:105, SEQ ID NO:107, SEQ ID NO:109, SEQ ID NO:111, SEQ ID NO:113, SEQ ID NO:115, SEQ ID NO:117, SEQ ID NO:119, SEQ ID NO:121, SEQ ID NO:123, SEQ ID NO:125, SEQ ID NO:127, SEQ ID NO:129, SEQ ID NO:131, SEQ ID NO:133, SEQ ID NO:135, SEQ ID NO:137, SEQ ID NO:139, SEQ ID NO:141, SEQ ID NO:143, SEQ ID NO:145, SEQ ID NO:147, SEQ ID NO:149, SEQ ID NO:151, SEQ ID NO:153, SEQ ID NO:155, SEQ ID NO:157, SEQ ID NO:159, SEQ ID NO:161, SEQ ID NO:163, SEQ ID NO:165, SEQ ID NO:167, SEQ ID NO:169, SEQ ID NO:171, SEQ ID NO:173, SEQ ID NO:175, SEQ ID NO:177, SEQ ID NO:179, SEQ ID NO:181, SEQ ID NO:183, SEQ ID NO:185, SEQ ID NO:187, SEQ ID NO:189, SEQ ID NO:191, SEQ ID NO:193, SEQ ID NO:195, SEQ ID NO:197, SEQ ID NO:199, SEQ ID NO:201, SEQ ID NO:203, SEQ ID NO:205, SEQ ID NO:207, SEQ ID NO:209, SEQ ID NO:211, SEQ ID NO:213, SEQ ID NO:215, SEQ ID NO:217, SEQ ID NO:219, SEQ ID NO:221, SEQ ID NO:223, SEQ ID NO:225, SEQ ID NO:227, SEQ ID NO:229, SEQ ID NO:231, SEQ ID NO:233, SEQ ID NO:235, SEQ ID NO:237, SEQ ID NO:239, SEQ ID NO:241, SEQ ID NO:243, SEQ ID NO:245, SEQ ID NO:247, SEQ ID NO:249, SEQ ID NO:251, SEQ ID NO:253, SEQ ID NO:255, SEQ ID NO:257, SEQ ID NO:259, SEQ ID NO:261, SEQ ID NO:263, SEQ ID NO:265, SEQ ID NO:267, SEQ ID NO:269, SEQ ID NO:271, SEQ ID NO:273, SEQ ID NO:275, SEQ ID NO:277, SEQ ID NO:279, SEQ ID NO:281, SEQ ID NO:283, SEQ ID NO:285, SEQ ID NO:287, SEQ ID NO:289, SEQ ID NO:291, SEQ ID NO:293, SEQ ID NO:295, SEQ ID NO:297, SEQ ID NO:299, SEQ ID NO:301, SEQ ID NO:303, SEQ ID NO:305, SEQ ID NO:307, SEQ ID NO:309, SEQ ID NO:311, SEQ ID NO:313, SEQ ID NO:315, SEQ ID NO:317, SEQ ID NO:319, SEQ ID NO:321, SEQ ID NO:323, SEQ ID NO:325, SEQ ID NO:327, SEQ ID NO:329, SEQ ID NO:331, SEQ ID NO:333, SEQ ID NO:335, SEQ ID NO:337, SEQ ID NO:339, SEQ ID NO:341, SEQ ID NO:343, SEQ ID NO:345, SEQ ID NO:347, SEQ ID NO:349, SEQ ID NO:351, SEQ ID NO:353, SEQ ID NO:355, SEQ ID NO:357, SEQ ID NO:359, SEQ ID NO:361, SEQ ID NO:363, SEQ ID NO:365, SEQ ID NO:367, SEQ ID NO:369, SEQ ID NO:371, SEQ ID NO:373, SEQ ID NO:375, SEQ ID NO:377, SEQ ID NO:379, SEQ ID NO:381, SEQ ID NO:383, SEQ ID NO:385, SEQ ID NO:387, SEQ ID NO:389, SEQ ID NO:391, SEQ ID NO:393, SEQ ID NO:395, SEQ ID NO:397, SEQ ID NO:399, SEQ ID NO:401, SEQ ID NO:403, SEQ ID NO:405, SEQ ID NO:407, SEQ ID NO:409, SEQ ID NO:411, SEQ ID NO:413, SEQ ID NO:415, SEQ ID NO:417, SEQ ID NO:419, SEQ ID NO:421, SEQ ID NO:423, SEQ ID NO:425, SEQ ID NO:427, SEQ ID NO:429, SEQ ID NO:431, SEQ ID NO:433, SEQ ID NO:435, SEQ ID NO:437, SEQ ID NO:439, SEQ ID NO:441, SEQ ID NO:443, SEQ ID NO:445, SEQ ID NO:447, SEQ ID NO:449, SEQ ID NO:451, SEQ ID NO:453, SEQ ID NO:455, SEQ ID NO:457, SEQ ID NO:459, SEQ ID NO:461, SEQ ID NO:463, SEQ ID NO:465, SEQ ID NO:467, SEQ ID NO:469, SEQ ID NO:471, SEQ ID NO:473, SEQ ID NO:475, SEQ ID NO:477, SEQ ID NO:479, SEQ ID NO:481, SEQ ID NO:483, SEQ ID NO:485, SEQ ID NO:487, SEQ ID NO:489, SEQ ID NO:491, SEQ ID NO:493, SEQ ID NO:495, SEQ ID NO:497, SEQ ID NO:499, SEQ ID NO:501, SEQ ID NO:503, SEQ ID NO:505, SEQ ID NO:507, SEQ ID NO:509, SEQ ID NO:511, SEQ ID NO:513, SEQ ID NO:515, SEQ ID NO:517, SEQ ID NO:519, SEQ ID NO:521, SEQ ID NO:523, SEQ ID NO:525, SEQ ID NO:527, SEQ ID NO:529, SEQ ID NO:531, SEQ ID NO:533, SEQ ID NO:535, SEQ ID NO:537, SEQ ID NO:539, SEQ ID NO:541, SEQ ID NO:543, SEQ ID NO:545, SEQ ID NO:547, SEQ ID NO:549, SEQ ID NO:551, SEQ ID NO:553, SEQ ID NO:555, SEQ ID NO:557, SEQ ID NO:559, SEQ ID NO:561, SEQ ID NO:563, SEQ ID NO:565, SEQ ID NO:567, SEQ ID NO:569, SEQ ID NO:571, SEQ ID NO:573, SEQ ID NO:575, SEQ ID NO:577, SEQ ID NO:579, SEQ ID NO:581, SEQ ID NO:583, SEQ ID NO:585, SEQ ID NO:587, SEQ ID NO:589, SEQ ID NO:591, SEQ ID NO:593, SEQ ID NO:595, SEQ ID NO:597, SEQ ID NO:599, SEQ ID NO:601, SEQ ID NO:603, SEQ ID NO:605, SEQ ID NO:607, SEQ ID NO:609, SEQ ID NO:611, SEQ ID NO:613, SEQ ID NO:615, SEQ ID NO:617, SEQ ID NO:619, SEQ ID NO:621, SEQ ID NO:623, SEQ ID NO:625, SEQ ID NO:627, SEQ ID NO:629, SEQ ID NO:631, SEQ ID NO:633, SEQ ID NO:635, SEQ ID NO:637, SEQ ID NO:639, SEQ ID NO:641, SEQ ID NO:643, SEQ ID NO:645, SEQ ID NO:647, SEQ ID NO:649, SEQ ID NO:651, SEQ ID NO:653, SEQ ID NO:655, SEQ ID NO:657, SEQ ID NO:659, SEQ ID NO:661, SEQ ID NO:663, SEQ ID NO:665, SEQ ID NO:667, SEQ ID NO:669, SEQ ID NO:671, SEQ ID NO:673, SEQ ID NO:675, SEQ ID NO:677, SEQ ID NO:679, SEQ ID NO:681, SEQ ID NO:683, SEQ ID NO:685, SEQ ID NO:687, SEQ ID NO:689, SEQ ID NO:691, SEQ ID NO:693, SEQ ID NO:695, SEQ ID NO:697, SEQ ID NO:699, SEQ ID NO:701, SEQ ID NO:703, SEQ ID NO:705, SEQ ID NO:707, SEQ ID NO:709, SEQ ID NO:711, SEQ ID NO:713, SEQ ID NO:715, SEQ ID NO:717, SEQ ID NO:719, SEQ ID NO:721, SEQ ID NO:723, SEQ ID NO:725, SEQ ID NO:727, SEQ ID NO:729, SEQ ID NO:731, SEQ ID NO:733, SEQ ID NO:735, SEQ ID NO:737, SEQ ID NO:739, SEQ ID NO:741, SEQ ID NO:743, SEQ ID NO:745, SEQ ID NO:747, SEQ ID NO:749, SEQ ID NO:751, SEQ ID NO:753, SEQ ID NO:755, SEQ ID NO:757, SEQ ID NO:759, SEQ ID NO:761, SEQ ID NO:763, SEQ ID NO:765, SEQ ID NO:767, SEQ ID NO:769, SEQ ID NO:771, SEQ ID NO:773, SEQ ID NO:775, SEQ ID NO:777, SEQ ID NO:779, SEQ ID NO:781, SEQ ID NO:783, SEQ ID NO:785, SEQ ID NO:787, SEQ ID NO:789, SEQ ID NO:791, SEQ ID NO:793, SEQ ID NO:795, SEQ ID NO:797, SEQ ID NO:799, SEQ ID NO:801, SEQ ID NO:803, SEQ ID NO:805, SEQ ID NO:807, SEQ ID NO:809, SEQ ID NO:811, SEQ ID NO:813, SEQ ID NO:815, SEQ ID NO:817, SEQ ID NO:819, SEQ ID NO:821, SEQ ID NO:823, SEQ ID NO:825, SEQ ID NO:827, SEQ ID NO:829, SEQ ID NO:831, SEQ ID NO:833, SEQ ID NO:835, SEQ ID NO:837, SEQ ID NO:839, SEQ ID NO:841, SEQ ID NO:843, SEQ ID NO:845, SEQ ID NO:847, SEQ ID NO:849, SEQ ID NO:851, SEQ ID NO:853, SEQ ID NO:855, SEQ ID NO:857, SEQ ID NO:859, SEQ ID NO:861, SEQ ID NO:863, SEQ ID NO:865, SEQ ID NO:867, SEQ ID NO:869, SEQ ID NO:871, SEQ ID NO:873, SEQ ID NO:875, SEQ ID NO:877, SEQ ID NO:879, SEQ ID NO:881, SEQ ID NO:883, SEQ ID NO:885, SEQ ID NO:887, SEQ ID NO:889, SEQ ID NO:891, SEQ ID NO:893, SEQ ID NO:895, SEQ ID NO:897, SEQ ID NO:899, SEQ ID NO:901, SEQ ID NO:903, SEQ ID NO:905, SEQ ID NO:907, SEQ ID NO:909, SEQ ID NO:911, SEQ ID NO:913, SEQ ID NO:915, SEQ ID NO:917, SEQ ID NO:919, SEQ ID NO:921, SEQ ID NO:923, SEQ ID NO:925, SEQ ID NO:927, SEQ ID NO:929, SEQ ID NO:931, SEQ ID NO:933, SEQ ID NO:935, SEQ ID NO:937, SEQ ID NO:939, SEQ ID NO:941, SEQ ID NO:943, SEQ ID NO:945, SEQ ID NO:947, SEQ ID NO:949, SEQ ID NO:951, SEQ ID NO:953, SEQ ID NO:955, SEQ ID NO:957, SEQ ID NO:959, SEQ ID NO:961, SEQ ID NO:963, SEQ ID NO:965, SEQ ID NO:967, SEQ ID NO:969, SEQ ID NO:971, SEQ ID NO:973, SEQ ID NO:975, SEQ ID NO:977, SEQ ID NO:979, SEQ ID NO:981, SEQ ID NO:983, SEQ ID NO:985, SEQ ID NO:987, SEQ ID NO:989, and/or SEQ ID NO:991, and subsequences thereof, e.g., at least about 10, 15, 20, 25, 30, 35, 40, 45, 50, 75, 100, 150, 200, 250, 300, 350, 400, 450, 500, 550, 600, 650, 700, 750, 800, 850, 900, 950, 1000, 1050, 1100, 1150, 1200, 1250, 1300, 1350, 1400, 1450, 1500 or more residues in length, or over the full length of a gene or transcript.

[0013] Exemplary nucleic acids of the invention also include isolated or recombinant nucleic acids encoding an exemplary polypeptide of the invention, e.g., a polypeptide having a sequence as set forth in SEQ ID NO:2, SEQ ID NO:4, SEQ ID NO:6, SEQ ID NO:8, SEQ ID NO:10, SEQ ID NO:12, SEQ ID NO:14, SEQ ID NO:16, SEQ ID NO:18, etc., including all polypeptides disclosed in the SEQ ID listing, which include all even numbered SEQ ID NO:s from SEQ ID NO:2 through SEQ ID NO:992, and subsequences thereof and variants thereof. In one aspect, the polypeptide has a hydrolase activity, e.g., an esterase, acylase, lipase, phospholipase or protease activity. In one aspect, the hydrolase activity is a regioselective and/or chemoselective activity.

[0014] In one aspect, the invention also provides hydrolase-encoding nucleic acids with a common novelty in that they are derived from mixed cultures. The invention provides hydrolase-encoding nucleic acids isolated from mixed cultures comprising a nucleic acid of the invention, e.g., a nucleic acid having a sequence at least about 50%, 51%, 52%, 53%, 54%, 55%, 56%, 57%, 58%, 59%, 60%, 61%, 62%, 63%, 64%, 65%, 66%, 67%, 68%, 69%, 70%, 71%, 72%, 73%, 74%, 75%, 76%, 77%, 78%, 79%, 80%, 81%, 82%, 83%, 84%, 85%, 86%, 87%, 88%, 89%, 90%, 91%, 92%, 93%, 94%, 95%, 96%, 97%, 98%, 99%, or more, or complete (100%) sequence identity to an exemplary nucleic acid of the invention over a region of at least about 10, 20, 30, 40, 50, 60, 70, 75, 100, 125, 150, 200, 250, 300, 350, 400, 450, 500, 550, 600, 650, 700, 750, 800, 850, 900, 950, 1000, 1050, 1100, 1150, 1200, 1250, 1300, 1350, 1400, 1450, 1500, 1550 or more, residues, wherein the nucleic acid encodes at least one polypeptide having a hydrolase activity, and the sequence identities are determined by analysis with a sequence comparison algorithm or by a visual inspection. In one aspect, the invention provides hydrolase-encoding nucleic acids isolated from mixed cultures comprising a nucleic acid of the invention.

[0015] In one aspect, the invention also provides hydrolase-encoding nucleic acids with a common novelty in that they are derived from environmental sources, e.g., mixed environmental sources. In one aspect, the invention provides hydrolase-encoding nucleic acids isolated from environmental sources, e.g., mixed environmental sources, comprising a nucleic acid sequence having at least about 50%, 51%, 52%, 53%, 54%, 55%, 56%, 57%, 58%, 59%, 60%, 61%, 62%, 63%, 64%, 65%, 66%, 67%, 68%, 69%, 70%, 71%, 72%, 73%, 74%, 75%, 76%, 77%, 78%, 79%, 80%, 81%, 82%, 83%, 84%, 85%, 86%, 87%, 88%, 89%, 90%, 91%, 92%, 93%, 94%, 95%, 96%, 97%, 98%, 99%, or more, or complete (100%) sequence identity to an exemplary nucleic acid of the invention over a region of at least about 10, 15, 20, 25, 30, 35, 40, 45, 50, 55, 60, 65, 70, 75, 100, 125, 150, 175, 200, 250, 300, 350, 400, 450, 500, 550, 600, 650, 700, 750, 800, 850, 900, 950, 1000, 1050, 1100, 1150, 1200, 1250, 1300, 1350, 1400, 1450, 1500, 1550 or more, residues, wherein the nucleic acid encodes at least one polypeptide having a hydrolase activity, and the sequence identities are determined by analysis with a sequence comparison algorithm or by a visual inspection. In one aspect, the invention provides hydrolase-encoding nucleic acids isolated from environmental sources, e.g., mixed environmental sources, comprising a nucleic acid of the invention.

[0016] In one aspect, the sequence comparison algorithm is a BLAST version 2.2.2 algorithm where a filtering setting is set to blastall-p blastp-d “nr pataa”-F F, and all other options are set to default.

[0017] Another aspect of the invention is an isolated or recombinant nucleic acid including at least 10 consecutive bases of a nucleic acid sequence of the invention, sequences substantially identical thereto, and the sequences complementary thereto.

[0018] In one aspect, the lipase activity comprises hydrolyzing a triacylglycerol (TAG), a diacylglycerol (DAG) or a monoacylglycerol (MAG). The lipase activity can comprise hydrolyzing a triacylglycerol to a diacylglycerol and a free fatty acid, or, hydrolyzing a triacylglycerol to a monoacylglycerol and free fatty acids, or, hydrolyzing a diacylglycerol to a monoacylglycerol and free fatty acids, or, hydrolyzing a monoacylglycerol to a free fatty acid and a glycerol. The lipase activity can comprise synthesizing a tryacylglycerol from a diacylglycerol or a monoacylglycerol and free fatty acids. The lipase activity can comprise synthesizing 1,3-dipalmitoyl-2-oleoylglycerol (POP), 1,3-distearoyl-2-oleoylglycerol (SOS), 1-palmitoyl-2-oleoyl-3-stearoylglycerol (POS) or 1-oleoyl-2,3-dimyristoylglycerol (OMM), long chain polyunsaturated fatty acids, arachidonic acid, docosahexaenoic acid (DHA) or eicosapentaenoic acid (EPA). The lipase activity can be triacylglycerol (TAG), diacylglycerol (DAG) or monoacylglycerol (MAG) position-specific. The lipase activity can be Sn2-specific, Sn1- or Sn3-specific. The lipase activity can be fatty acid specific. The lipase activity can comprise modifying oils by hydrolysis, alcoholysis, esterification, transesterification or interesterification. The lipase activity can be regio-specific or chemoselective. The lipase activity can comprise synthesis of enantiomerically pure chiral products. The lipase activity can comprise synthesis of umbelliferyl fatty acid (FA) esters.

[0019] In one aspect, the isolated or recombinant nucleic acid encodes a polypeptide having a hydrolase activity, e.g., an esterase, acylase, lipase, phospholipase or protease activity, which is thermostable. The polypeptide can retain activity under conditions comprising a temperature range of between about 37° C. to about 95° C.; between about 55° C. to about 85° C., between about 70° C. to about 95° C., or, between about 90° C. to about 95° C. In one aspect, the polypeptide has activity at temperatures in the range from greater than 90° C. to about 95° C. at pH 4.5. In one aspect, hydrolases of the invention are stable at high temperatures, e.g., they are active under conditions of at least about 50° C., 60° C., 70° C., 75° C., 80° C., 85° C., 90° C., 95° C. or more, or between about 80° C. to 85° C. to 90° C. to 95° C. In one aspect, the polypeptide has activity at temperatures in the range between about 1° C. to about 5° C., between about 5° C. to about 15° C., between about 15° C. to about 25° C., between about 25° C. to about 37° C.

[0020] In another aspect, the isolated or recombinant nucleic acid encodes a polypeptide having a hydrolase activity, e.g., an esterase, acylase, lipase, phospholipase or protease activity, which is thermotolerant. The polypeptide can retain activity after exposure to a temperature in the range from greater than 37° C. to about 95° C. or anywhere in the range from greater than 55° C. to about 85° C. In one aspect, hydrolases of the invention can retain activity after exposure to conditions comprising at least about 50° C., 60° C., 70° C., 75° C., 80° C., 85° C., 90° C., 95° C. or more, or between about 80° C. to 85° C. to 90° C. to 95° C. In one aspect, the polypeptide retains activity after exposure to a temperature in the range from greater than 90° C. to about 95° C. at pH 4.5. In one aspect, the polypeptide retains enzyme activity after exposure to a temperature in the range between about 1° C. to about 5° C., between about 5° C. to about 15° C., between about 15° C. to about 25° C., between about 25° C. to about 37° C.

[0021] The invention provides isolated or recombinant nucleic acids comprising a sequence that hybridizes under stringent conditions to a nucleic acid of the invention, including any exemplary nucleic acid of the invention, e.g., a sequence as set forth in SEQ ID NO:1, SEQ ID NO:3, SEQ ID NO:5, SEQ ID NO:7, SEQ ID NO:9, SEQ ID NO:11, SEQ ID NO:13, SEQ ID NO:15, SEQ ID NO:17, SEQ ID NO:19, SEQ ID NO:21, SEQ ID NO:23, SEQ ID NO:25, SEQ ID NO:27, SEQ ID NO:29, SEQ ID NO:31, SEQ ID NO:33, SEQ ID NO:35, SEQ ID NO:37, SEQ ID NO:39, SEQ ID NO:41, SEQ ID NO:43, SEQ ID NO:45, SEQ ID NO:47, SEQ ID NO:49, SEQ ID NO:51, SEQ ID NO:53, SEQ ID NO:55, SEQ ID NO:57, SEQ ID NO:59, SEQ ID NO:61, SEQ ID NO:63, SEQ ID NO:65, SEQ ID NO:67, SEQ ID NO:69, SEQ ID NO:71, SEQ ID NO:73, SEQ ID NO:75, SEQ ID NO:77, SEQ ID NO:79, SEQ ID NO:81, SEQ ID NO:83, SEQ ID NO:85, SEQ ID NO:87, SEQ ID NO:89, SEQ ID NO:91, SEQ ID NO:93, SEQ ID NO:95, SEQ ID NO:97, SEQ ID NO:99, SEQ ID NO:101, SEQ ID NO:103, SEQ ID NO:105, SEQ ID NO:107, SEQ ID NO:109, SEQ ID NO:111, SEQ ID NO:113, SEQ ID NO:115, SEQ ID NO:117, SEQ ID NO:119, SEQ ID NO:121, SEQ ID NO:123, SEQ ID NO:125, SEQ ID NO:127, SEQ ID NO:129, SEQ ID NO:131, SEQ ID NO:133, SEQ ID NO:135, SEQ ID NO:137, SEQ ID NO:139, SEQ ID NO:141, SEQ ID NO:143, SEQ ID NO:145, SEQ ID NO:147, SEQ ID NO:149, SEQ ID NO:151, SEQ ID NO:153, SEQ ID NO:155, SEQ ID NO:157, SEQ ID NO:159, SEQ ID NO:161, SEQ ID NO:163, SEQ ID NO:165, SEQ ID NO:167, SEQ ID NO:169, SEQ ID NO:171, SEQ ID NO:173, SEQ ID NO:175, SEQ ID NO:177, SEQ ID NO:179, SEQ ID NO:181, SEQ ID NO:183, SEQ ID NO:185, SEQ ID NO:187, SEQ ID NO:189, SEQ ID NO:191, SEQ ID NO:193, SEQ ID NO:195, SEQ ID NO:197, SEQ ID NO:199, SEQ ID NO:201, SEQ ID NO:203, SEQ ID NO:205, SEQ ID NO:207, SEQ ID NO:209, SEQ ID NO:21, SEQ ID NO:213, SEQ ID NO:215, SEQ ID NO:217, SEQ ID NO:219, SEQ ID NO:221, SEQ ID NO:223, SEQ ID NO:225, SEQ ID NO:227, SEQ ID NO:229, SEQ ID NO:231, SEQ ID NO:233, SEQ ID NO:235, SEQ ID NO:237, SEQ ID NO:239, SEQ ID NO:241, SEQ ID NO:243, SEQ ID NO:245, SEQ ID NO:247, SEQ ID NO:249, SEQ ID NO:251, SEQ ID NO:253, SEQ ID NO:255, SEQ ID NO:257, SEQ ID NO:259, SEQ ID NO:261, SEQ ID NO:263, SEQ ID NO:265, SEQ ID NO:267, SEQ ID NO:269, SEQ ID NO:271, SEQ ID NO:273, SEQ ID NO:275, SEQ ID NO:277, SEQ ID NO:279, SEQ ID NO:281, SEQ ID NO:283, SEQ ID NO:285, SEQ ID NO:287, SEQ ID NO:289, SEQ ID NO:291, SEQ ID NO:293, SEQ ID NO:295, SEQ ID NO:297, SEQ ID NO:299, SEQ ID NO:301, SEQ ID NO:303, SEQ ID NO:305, SEQ ID NO:307, SEQ ID NO:309, SEQ ID NO:311, SEQ ID NO:313, SEQ ID NO:315, SEQ ID NO:317, SEQ ID NO:319, SEQ ID NO:321, SEQ ID NO:323, SEQ ID NO:325, SEQ ID NO:327, SEQ ID NO:329, SEQ ID NO:331, SEQ ID NO:333, SEQ ID NO:335, SEQ ID NO:337, SEQ ID NO:339, SEQ ID NO:341, SEQ ID NO:343, SEQ ID NO:345, SEQ ID NO:347, SEQ ID NO:349, SEQ ID NO:351, SEQ ID NO:353, SEQ ID NO:355, SEQ ID NO:357, SEQ ID NO:359, SEQ ID NO:361, SEQ ID NO:363, SEQ ID NO:365, SEQ ID NO:367, SEQ ID NO:369, SEQ ID NO:371, SEQ ID NO:373, SEQ ID NO:375, SEQ ID NO:377, SEQ ID NO:379, SEQ ID NO:381, SEQ ID NO:383, SEQ ID NO:385, SEQ ID NO:387, SEQ ID NO:389, SEQ ID NO:391, SEQ ID NO:393, SEQ ID NO:395, SEQ ID NO:397, SEQ ID NO:399, SEQ ID NO:401, SEQ ID NO:403, SEQ ID NO:405, SEQ ID NO:407, SEQ ID NO:409, SEQ ID NO:411, SEQ ID NO:413, SEQ ID NO:415, SEQ ID NO:417, SEQ ID NO:419, SEQ ID NO:421, SEQ ID NO:423, SEQ ID NO:425, SEQ ID NO:427, SEQ ID NO:429, SEQ ID NO:431, SEQ ID NO:433, SEQ ID NO:435, SEQ ID NO:437, SEQ ID NO:439, SEQ ID NO:441, SEQ ID NO:443, SEQ ID NO:445, SEQ ID NO:447, SEQ ID NO:449, SEQ ID NO:451, SEQ ID NO:453, SEQ ID NO:455, SEQ ID NO:457, SEQ ID NO:459, SEQ ID NO:461, SEQ ID NO:463, SEQ ID NO:465, SEQ ID NO:467, SEQ ID NO:469, SEQ ID NO:471, SEQ ID NO:473, SEQ ID NO:475, SEQ ID NO:477, SEQ ID NO:479, SEQ ID NO:481, SEQ ID NO:483, SEQ ID NO:485, SEQ ID NO:487, SEQ ID NO:489, SEQ ID NO:491, SEQ ID NO:493, SEQ ID NO:495, SEQ ID NO:497, SEQ ID NO:499, SEQ ID NO:501, SEQ ID NO:503, SEQ ID NO:505, SEQ ID NO:507, SEQ ID NO:509, SEQ ID NO:511, SEQ ID NO:513, SEQ ID NO:515, SEQ ID NO:517, SEQ ID NO:519, SEQ ID NO:521, SEQ ID NO:523, SEQ ID NO:525, SEQ ID NO:527, SEQ ID NO:529, SEQ ID NO:531, SEQ ID NO:533, SEQ ID NO:535, SEQ ID NO:537, SEQ ID NO:539, SEQ ID NO:541, SEQ ID NO:543, SEQ ID NO:545, SEQ ID NO:547, SEQ ID NO:549, SEQ ID NO:551, SEQ ID NO:553, SEQ ID NO:555, SEQ ID NO:557, SEQ ID NO:559, SEQ ID NO:561, SEQ ID NO:563, SEQ ID NO:565, SEQ ID NO:567, SEQ ID NO:569, SEQ ID NO:571, SEQ ID NO:573, SEQ ID NO:575, SEQ ID NO:577, SEQ ID NO:579, SEQ ID NO:581, SEQ ID NO:583, SEQ ID NO:585, SEQ ID NO:587, SEQ ID NO:589, SEQ ID NO:591, SEQ ID NO:593, SEQ ID NO:595, SEQ ID NO:597, SEQ ID NO:599, SEQ ID NO:601, SEQ ID NO:603, SEQ ID NO:605, SEQ ID NO:607, SEQ ID NO:609, SEQ ID NO:611, SEQ ID NO:613, SEQ ID NO:615, SEQ ID NO:617, SEQ ID NO:619, SEQ ID NO:621, SEQ ID NO:623, SEQ ID NO:625, SEQ ID NO:627, SEQ ID NO:629, SEQ ID NO:631, SEQ ID NO:633, SEQ ID NO:635, SEQ ID NO:637, SEQ ID NO:639, SEQ ID NO:641, SEQ ID NO:643, SEQ ID NO:645, SEQ ID NO:647, SEQ ID NO:649, SEQ ID NO:651, SEQ ID NO:653, SEQ ID NO:655, SEQ ID NO:657, SEQ ID NO:659, SEQ ID NO:661, SEQ ID NO:663, SEQ ID NO:665, SEQ ID NO:667, SEQ ID NO:669, SEQ ID NO:671, SEQ ID NO:673, SEQ ID NO:675, SEQ ID NO:677, SEQ ID NO:679, SEQ ID NO:681, SEQ ID NO:683, SEQ ID NO:685, SEQ ID NO:687, SEQ ID NO:689, SEQ ID NO:691, SEQ ID NO:693, SEQ ID NO:695, SEQ ID NO:697, SEQ ID NO:699, SEQ ID NO:701, SEQ ID NO:703, SEQ ID NO:705, SEQ ID NO:707, SEQ ID NO:709, SEQ ID NO:711, SEQ ID NO:713, SEQ ID NO:715, SEQ ID NO:717, SEQ ID NO:719, SEQ ID NO:721, SEQ ID NO:723, SEQ ID NO:725, SEQ ID NO:727, SEQ ID NO:729, SEQ ID NO:731, SEQ ID NO:733, SEQ ID NO:735, SEQ ID NO:737, SEQ ID NO:739, SEQ ID NO:741, SEQ ID NO:743, SEQ ID NO:745, SEQ ID NO:747, SEQ ID NO:749, SEQ ID NO:751, SEQ ID NO:753, SEQ ID NO:755, SEQ ID NO:757, SEQ ID NO:759, SEQ ID NO:761, SEQ ID NO:763, SEQ ID NO:765, SEQ ID NO:767, SEQ ID NO:769, SEQ ID NO:771, SEQ ID NO:773, SEQ ID NO:775, SEQ ID NO:777, SEQ ID NO:779, SEQ ID NO:781, SEQ ID NO:783, SEQ ID NO:785, SEQ ID NO:787, SEQ ID NO:789, SEQ ID NO:791, SEQ ID NO:793, SEQ ID NO:795, SEQ ID NO:797, SEQ ID NO:799, SEQ ID NO:801, SEQ ID NO:803, SEQ ID NO:805, SEQ ID NO:807, SEQ ID NO:809, SEQ ID NO:811, SEQ ID NO:813, SEQ ID NO:815, SEQ ID NO:817, SEQ ID NO:819, SEQ ID NO:821, SEQ ID NO:823, SEQ ID NO:825, SEQ ID NO:827, SEQ ID NO:829, SEQ ID NO:831, SEQ ID NO:833, SEQ ID NO:835, SEQ ID NO:837, SEQ ID NO:839, SEQ ID NO:841, SEQ ID NO:843, SEQ ID NO:845, SEQ ID NO:847, SEQ ID NO:849, SEQ ID NO:851, SEQ ID NO:853, SEQ ID NO:855, SEQ ID NO:857, SEQ ID NO:859, SEQ ID NO:861, SEQ ID NO:863, SEQ ID NO:865, SEQ ID NO:867, SEQ ID NO:869, SEQ ID NO:871, SEQ ID NO:873, SEQ ID NO:875, SEQ ID NO:877, SEQ ID NO:879, SEQ ID NO:881, SEQ ID NO:883, SEQ ID NO:885, SEQ ID NO:887, SEQ ID NO:889, SEQ ID NO:891, SEQ ID NO:893, SEQ ID NO:895, SEQ ID NO:897, SEQ ID NO:899, SEQ ID NO:901, SEQ ID NO:903, SEQ ID NO:905, SEQ ID NO:907, SEQ ID NO:909, SEQ ID NO:911, SEQ ID NO:913, SEQ ID NO:915, SEQ ID NO:917, SEQ ID NO:919, SEQ ID NO:921, SEQ ID NO:923, SEQ ID NO:925, SEQ ID NO:927, SEQ ID NO:929, SEQ ID NO:931, SEQ ID NO:933, SEQ ID NO:935, SEQ ID NO:937, SEQ ID NO:939, SEQ ID NO:941, SEQ ID NO:943, SEQ ID NO:945, SEQ ID NO:947, SEQ ID NO:949, SEQ ID NO:951, SEQ ID NO:953, SEQ ID NO:955, SEQ ID NO:957, SEQ ID NO:959, SEQ ID NO:961, SEQ ID NO:963, SEQ ID NO:965, SEQ ID NO:967, SEQ ID NO:969, SEQ ID NO:971, SEQ ID NO:973, SEQ ID NO:975, SEQ ID NO:977, SEQ ID NO:979, SEQ ID NO:981, SEQ ID NO:983, SEQ ID NO:985, SEQ ID NO:987, SEQ ID NO:989, and SEQ ID NO:991, or fragments or subsequences thereof. In one aspect, the nucleic acid encodes a polypeptide having a hydrolase activity, e.g., an esterase, acylase, lipase, phospholipase or protease activity. The nucleic acid can be at least about 10, 15, 20, 25, 30, 35, 40, 45, 50, 55, 60, 65, 70, 75, 100, 125, 150, 175, 200, 250, 300, 350, 400, 450, 500, 550, 600, 650, 700, 750, 800, 850, 900, 950, 1000, 1050, 1100, 1150, 1200, 1250, 1300, 1350, 1400, 1450, 1500 or more residues in length or the full length of the gene or transcript. In one aspect, the stringent conditions include a wash step comprising a wash in 0.2×SSC at a temperature of about 65° C. for about 15 minutes.

[0022] The invention provides a nucleic acid probe, e.g., a probe for identifying a nucleic acid encoding a polypeptide having a hydrolase activity, e.g., an esterase, acylase, lipase, phospholipase or protease activity, wherein the probe comprises at least about 10, 15, 20, 25, 30, 35, 40, 45, 50, 55, 60, 65, 70, 75, 80, 85, 90, 95, 100, 150, 200, 250, 300, 350, 400, 450, 500, 550, 600, 650, 700, 750, 800, 850, 900, 950, 1000 or more, consecutive bases of a sequence of the invention, or fragments or subsequences thereof, wherein the probe identifies the nucleic acid by binding or hybridization. The probe can comprise an oligonucleotide comprising at least about 10 to 50, about 20 to 60, about 30 to 70, about 40 to 80, or about 60 to 100 consecutive bases of a sequence comprising a sequence of the invention, or fragments or subsequences thereof. The probe can comprise an oligonucleotide comprising at least about 10 to 50, about 20 to 60, about 30 to 70, about 40 to 80, or about 60 to 100 consecutive bases of a nucleic acid sequence of the invention, or a subsequence thereof.

[0023] The invention provides an amplification primer sequence pair for amplifying a nucleic acid encoding a polypeptide having a hydrolase activity, e.g., an esterase, acylase, lipase, phospholipase or protease activity, wherein the primer pair is capable of amplifying a nucleic acid comprising a sequence of the invention, or fragments or subsequences thereof. One or each member of the amplification primer sequence pair can comprise an oligonucleotide comprising at least about 10 to 50 consecutive bases of the sequence.

[0024] The invention provides methods of amplifying a nucleic acid encoding a polypeptide having a hydrolase activity, e.g., an esterase, acylase, lipase, phospholipase or protease activity, comprising amplification of a template nucleic acid with an amplification primer sequence pair capable of amplifying a nucleic acid sequence of the invention, or fragments or subsequences thereof.

[0025] The invention provides expression cassettes comprising a nucleic acid of the invention or a subsequence thereof. In one aspect, the expression cassette can comprise the nucleic acid that is operably linked to a promoter. The promoter can be a viral, bacterial, mammalian or plant promoter. In one aspect, the plant promoter can be a potato, rice, corn, wheat, tobacco or barley promoter. The promoter can be a constitutive promoter. The constitutive promoter can comprise CaMV35S. In another aspect, the promoter can be an inducible promoter. In one aspect, the promoter can be a tissue-specific promoter or an environmentally regulated or a developmentally regulated promoter. Thus, the promoter can be, e.g., a seed-specific, a leaf-specific, a root-specific, a stem-specific or an abscission-induced promoter. In one aspect, the expression cassette can further comprise a plant or plant virus expression vector.

[0026] The invention provides cloning vehicles comprising an expression cassette (e.g., a vector) of the invention or a nucleic acid of the invention. The cloning vehicle can be a viral vector, a plasmid, a phage, a phagemid, a cosmid, a fosmid, a bacteriophage or an artificial chromosome. The viral vector can comprise an adenovirus vector, a retroviral vector or an adeno-associated viral vector. The cloning vehicle can comprise a bacterial artificial chromosome (BAC), a plasmid, a bacteriophage Pl-derived vector (PAC), a yeast artificial chromosome (YAC), or a mammalian artificial chromosome (MAC).

[0027] The invention provides transformed cell comprising a nucleic acid of the invention or an expression cassette (e.g., a vector) of the invention, or a cloning vehicle of the invention. In one aspect, the transformed cell can be a bacterial cell, a mammalian cell, a fungal cell, a yeast cell, an insect cell or a plant cell. In one aspect, the plant cell can be a potato, wheat, rice, corn, tobacco or barley cell.

[0028] The invention provides transgenic non-human animals comprising a nucleic acid of the invention or an expression cassette (e.g., a vector) of the invention. In one aspect, the animal is a mouse.

[0029] The invention provides transgenic plants comprising a nucleic acid of the invention or an expression cassette (e.g., a vector) of the invention. The transgenic plant can be a corn plant, a potato plant, a tomato plant, a wheat plant, an oilseed plant, a rapeseed plant, a soybean plant, a rice plant, a barley plant or a tobacco plant.

[0030] The invention provides transgenic seeds comprising a nucleic acid of the invention or an expression cassette (e.g., a vector) of the invention. The transgenic seed can be rice, a corn seed, a wheat kernel, an oilseed, a rapeseed, a soybean seed, a palm kernel, a sunflower seed, a sesame seed, a peanut or a tobacco plant seed.

[0031] The invention provides an antisense oligonucleotide comprising a nucleic acid sequence complementary to or capable of hybridizing under stringent conditions to a nucleic acid of the invention. The invention provides methods of inhibiting the translation of a hydrolase message in a cell comprising administering to the cell or expressing in the cell an antisense oligonucleotide comprising a nucleic acid sequence complementary to or capable of hybridizing under stringent conditions to a nucleic acid of the invention.

[0032] The invention provides methods of inhibiting the translation of an enzyme message in a cell comprising administering to the cell or expressing in the cell an antisense oligonucleotide comprising a nucleic acid sequence complementary to or capable of hybridizing under stringent conditions to a nucleic acid of the invention. The invention provides double-stranded inhibitory RNA (RNAi, or RNA interference) molecules (including small interfering RNA, or siRNAs, for inhibiting transcription, and microRNAs, or miRNAs, for inhibiting translation) comprising a subsequence of a sequence of the invention. In one aspect, the siRNA is between about 21 to 24 residues, or, about at least 15, 16, 17, 18, 19, 20, 21, 22, 23, 24, 25, 26, 27, 28, 29, 30, 31, 32, 33, 34, 35, 40, 45, 50, 55, 60, 65, 70, 75, 80, 85, 90, 95, 100 or more duplex nucleotides in length. The invention provides methods of inhibiting the expression of a polypeptide (e.g., having hydrolase activity) in a cell comprising administering to the cell or expressing in the cell a double-stranded inhibitory RNA (siRNA or miRNA), wherein the RNA comprises a subsequence of a sequence of the invention.

[0033] The invention provides an isolated, synthetic or recombinant polypeptide comprising an amino acid sequence having at least about 50%, 51%, 52%, 53%, 54%, 55%, 56%, 57%, 58%, 59%, 60%, 61%, 62%, 63%, 64%, 65%, 66%, 67%, 68%, 69%, 70%, 71%, 72%, 73%, 74%, 75%, 76%, 77%, 78%, 79%, 80%, 81%, 82%, 83%, 84%, 85%, 86%, 87%, 88%, 89%, 90%, 91%, 92%, 93%, 94%, 95%, 96%, 97%, 98%, 99%, or more or complete (100%) sequence identity to an exemplary polypeptide or peptide of the invention over a region of at least about 10, 15, 20, 25, 30, 35, 40, 45, 50, 55, 60, 65, 70, 75, 100, 125, 150, 175, 200, 250, 300, 350, 400, 450, 500, 550, 600, 650, 700, 750, 800, 850, 900, 950, 1000, 1050, 1100, 1150, 1200, 1250, 1300, 1350, 1400, 1450, 1500, 1550 or more residues, or over the full length of the polypeptide, and the sequence identities are determined by analysis with a sequence comparison algorithm or by a visual inspection. Exemplary polypeptide or peptide sequences of the invention include SEQ ID NO:2, SEQ ID NO:4, SEQ ID NO:6, SEQ ID NO:8, SEQ ID NO:10, SEQ ID NO:12, SEQ ID NO:14, SEQ ID NO:16, SEQ ID NO:18, SEQ ID NO:20, SEQ ID NO:22, SEQ ID NO:24, SEQ ID NO:26, SEQ ID NO:28, SEQ ID NO:30, SEQ ID NO:32, SEQ ID NO:34, SEQ ID NO:36, SEQ ID NO:38, SEQ ID NO:40, SEQ ID NO:42, SEQ ID NO:44, SEQ ID NO:46, SEQ ID NO:48, SEQ ID NO:50, SEQ ID NO:52, SEQ ID NO:54, SEQ ID NO:56, SEQ ID NO:58, SEQ ID NO:60, SEQ ID NO:62, SEQ ID NO:64, SEQ ID NO:66, SEQ ID NO:68, SEQ ID NO:70, SEQ ID NO:72, SEQ ID NO:74, SEQ ID NO:76, SEQ ID NO:78, SEQ ID NO:80, SEQ ID NO:82, SEQ ID NO:84, SEQ ID NO:86, SEQ ID NO:88, SEQ ID NO:90, SEQ ID NO:92, SEQ ID NO:94, SEQ ID NO:96, SEQ ID NO:98, SEQ ID NO:100, SEQ ID NO:102, SEQ ID NO:104, SEQ ID NO:106, SEQ ID NO:108, SEQ ID NO:110, SEQ ID NO:112, SEQ ID NO:114, SEQ ID NO:116, SEQ ID NO:118, SEQ ID NO:120, SEQ ID NO:122, SEQ ID NO:124, SEQ ID NO:126, SEQ ID NO:128, SEQ ID NO:130, SEQ ID NO:132, SEQ ID NO:134, SEQ ID NO:136, SEQ ID NO:138, SEQ ID NO:140, SEQ ID NO:142, SEQ ID NO:143, SEQ ID NO:146, SEQ ID NO:148, SEQ ID NO:150, SEQ ID NO:152, SEQ ID NO:154, SEQ ID NO:156, SEQ ID NO:158, SEQ ID NO:160, SEQ ID NO:162, SEQ ID NO:164, SEQ ID NO:166, SEQ ID NO:168, SEQ ID NO:170, SEQ ID NO:172, SEQ ID NO:174, SEQ ID NO:176, SEQ ID NO:178, SEQ ID NO:180, SEQ ID NO:182, SEQ ID NO:184, SEQ ID NO:186, SEQ ID NO:188, SEQ ID NO:190, SEQ ID NO:192, SEQ ID NO:194, SEQ ID NO:196, SEQ ID NO:198, SEQ ID NO:200, SEQ ID NO:202, SEQ ID NO:204, SEQ ID NO:206, SEQ ID NO:208, SEQ ID NO:210, SEQ ID NO:212, SEQ ID NO:214, SEQ ID NO:216, SEQ ID NO:218, SEQ ID NO:220, SEQ ID NO:222, SEQ ID NO:224, SEQ ID NO:226, SEQ ID NO:228, SEQ ID NO:230, SEQ ID NO:232, SEQ ID NO:234, SEQ ID NO:236, SEQ ID NO:238, SEQ ID NO:240, SEQ ID NO:242, SEQ ID NO:244, SEQ ID NO:246, SEQ ID NO:248, SEQ ID NO:250, SEQ ID NO:252, SEQ ID NO:254, SEQ ID NO:256, SEQ ID NO:258, SEQ ID NO:260, SEQ ID NO:262, SEQ ID NO:264, SEQ ID NO:266, SEQ ID NO:268, SEQ ID NO:270, SEQ ID NO:272, SEQ ID NO:274, SEQ ID NO:276, SEQ ID NO:278, SEQ ID NO:280, SEQ ID NO:282, SEQ ID NO:284, SEQ ID NO:286, SEQ ID NO:288, SEQ ID NO:290, SEQ ID NO:292, SEQ ID NO:294, SEQ ID NO:296, SEQ ID NO:298, SEQ ID NO:300, SEQ ID NO:302, SEQ ID NO:304, SEQ ID NO:306, SEQ ID NO:308, SEQ ID NO:310, SEQ ID NO:312, SEQ ID NO:314, SEQ ID NO:316, SEQ ID NO:318, SEQ ID NO:320, SEQ ID NO:322, SEQ ID NO:324, SEQ ID NO:326, SEQ ID NO:328, SEQ ID NO:330, SEQ ID NO:332, SEQ ID NO:334, SEQ ID NO:336, SEQ ID NO:338, SEQ ID NO:340, SEQ ID NO:342, SEQ ID NO:344, SEQ ID NO:346, SEQ ID NO:348, SEQ ID NO:350, SEQ ID NO:352, SEQ ID NO:354, SEQ ID NO:356, SEQ ID NO:358, SEQ ID NO:360, SEQ ID NO:362, SEQ ID NO:364, SEQ ID NO:366, SEQ ID NO:368, SEQ ID NO:370, SEQ ID NO:372, SEQ ID NO:374, SEQ ID NO:376, SEQ ID NO:378, SEQ ID NO:380, SEQ ID NO:382, SEQ ID NO:384, SEQ ID NO:386, SEQ ID NO:388, SEQ ID NO:390, SEQ ID NO:392, SEQ ID NO:394, SEQ ID NO:396, SEQ ID NO:398, SEQ ID NO:400, SEQ ID NO:402, SEQ ID NO:404, SEQ ID NO:406, SEQ ID NO:408, SEQ ID NO:410, SEQ ID NO:412, SEQ ID NO:414, SEQ ID NO:416, SEQ ID NO:418, SEQ ID NO:420, SEQ ID NO:422, SEQ ID NO:424, SEQ ID NO:426, SEQ ID NO:428, SEQ ID NO:430, SEQ ID NO:432, SEQ ID NO:434, SEQ ID NO:436, SEQ ID NO:438, SEQ ID NO:440, SEQ ID NO:442, SEQ ID NO:444, SEQ ID NO:446, SEQ ID NO:448, SEQ ID NO:450, SEQ ID NO:452, SEQ ID NO:454, SEQ ID NO:456, SEQ ID NO:458, SEQ ID NO:460, SEQ ID NO:462, SEQ ID NO:464, SEQ ID NO:466, SEQ ID NO:468, SEQ ID NO:470, SEQ ID NO:472, SEQ ID NO:474, SEQ ID NO:476, SEQ ID NO:478, SEQ ID NO:480, SEQ ID NO:482, SEQ ID NO:484, SEQ ID NO:486, SEQ ID NO:488, SEQ ID NO:490, SEQ ID NO:492, SEQ ID NO:494, SEQ ID NO:496, SEQ ID NO:498, SEQ ID NO:500, SEQ ID NO:502, SEQ ID NO:504, SEQ ID NO:506, SEQ ID NO:508, SEQ ID NO:510, SEQ ID NO:512, SEQ ID NO:514, SEQ ID NO:516, SEQ ID NO:518, SEQ ID NO:520, SEQ ID NO:522, SEQ ID NO:524, SEQ ID NO:526, SEQ ID NO:528, SEQ ID NO:530, SEQ ID NO:532, SEQ ID NO:534, SEQ ID NO:536, SEQ ID NO:538, SEQ ID NO:540, SEQ ID NO:542, SEQ ID NO:544, SEQ ID NO:546, SEQ ID NO:548, SEQ ID NO:550, SEQ ID NO:552, SEQ ID NO:554, SEQ ID NO:556, SEQ ID NO:558, SEQ ID NO:560, SEQ ID NO:562, SEQ ID NO:564, SEQ ID NO:566, SEQ ID NO:568, SEQ ID NO:570, SEQ ID NO:572, SEQ ID NO:574, SEQ ID NO:576, SEQ ID NO:578, SEQ ID NO:580, SEQ ID NO:582, SEQ ID NO:584, SEQ ID NO:586, SEQ ID NO:588, SEQ ID NO:590, SEQ ID NO:592, SEQ ID NO:594, SEQ ID NO:596, SEQ ID NO:598, SEQ ID NO:600, SEQ ID NO:602, SEQ ID NO:604, SEQ ID NO:606, SEQ ID NO:608, SEQ ID NO:610, SEQ ID NO:612, SEQ ID NO:614, SEQ ID NO:616, SEQ ID NO:618, SEQ ID NO:620, SEQ ID NO:622, SEQ ID NO:624, SEQ ID NO:626, SEQ ID NO:628, SEQ ID NO:630, SEQ ID NO:632, SEQ ID NO:634, SEQ ID NO:636, SEQ ID NO:638, SEQ ID NO:640, SEQ ID NO:642, SEQ ID NO:644, SEQ ID NO:646, SEQ ID NO:648, SEQ ID NO:650, SEQ ID NO:652, SEQ ID NO:654, SEQ ID NO:656, SEQ ID NO:658, SEQ ID NO:660, SEQ ID NO:662, SEQ ID NO:664, SEQ ID NO:666, SEQ ID NO:668, SEQ ID NO:670, SEQ ID NO:672, SEQ ID NO:674, SEQ ID NO:676, SEQ ID NO:678, SEQ ID NO:680, SEQ ID NO:682, SEQ ID NO:684, SEQ ID NO:686, SEQ ID NO:688, SEQ ID NO:690, SEQ ID NO:692, SEQ ID NO:694, SEQ ID NO:696, SEQ ID NO:698, SEQ ID NO:700, SEQ ID NO:702, SEQ ID NO:704, SEQ ID NO:706, SEQ ID NO:708, SEQ ID NO:710, SEQ ID NO:712, SEQ ID NO:714, SEQ ID NO:716, SEQ ID NO:718, SEQ ID NO:720, SEQ ID NO:722, SEQ ID NO:724, SEQ ID NO:726, SEQ ID NO:728, SEQ ID NO:730, SEQ ID NO:732, SEQ ID NO:734, SEQ ID NO:736, SEQ ID NO:738, SEQ ID NO:740, SEQ ID NO:742, SEQ ID NO:744, SEQ ID NO:746, SEQ ID NO:748, SEQ ID NO:750, SEQ ID NO:752, SEQ ID NO:754, SEQ ID NO:756, SEQ ID NO:758, SEQ ID NO:760, SEQ ID NO:762, SEQ ID NO:764, SEQ ID NO:766, SEQ ID NO:768, SEQ ID NO:770, SEQ ID NO:772, SEQ ID NO:774, SEQ ID NO:776, SEQ ID NO:778, SEQ ID NO:780, SEQ ID NO:782, SEQ ID NO:784, SEQ ID NO:786, SEQ ID NO:788, SEQ ID NO:790, SEQ ID NO:792, SEQ ID NO:794, SEQ ID NO:796, SEQ ID NO:798, SEQ ID NO:800, SEQ ID NO:802, SEQ ID NO:804, SEQ ID NO:808, SEQ ID NO:808, SEQ ID NO:810, SEQ ID NO:812, SEQ ID NO:814, SEQ ID NO:816, SEQ ID NO:818, SEQ ID NO:820, SEQ ID NO:822, SEQ ID NO:824, SEQ ID NO:826, SEQ ID NO:828, SEQ ID NO:830, SEQ ID NO:832, SEQ ID NO:834, SEQ ID NO:836, SEQ ID NO:838, SEQ ID NO:840, SEQ ID NO:842, SEQ ID NO:844, SEQ ID NO:846, SEQ ID NO:848, SEQ ID NO:850, SEQ ID NO:852, SEQ ID NO:854, SEQ ID NO:856, SEQ ID NO:858, SEQ ID NO:860, SEQ ID NO:862, SEQ ID NO:864, SEQ ID NO:866, SEQ ID NO:868, SEQ ID NO:870, SEQ ID NO:872, SEQ ID NO:874, SEQ ID NO:876, SEQ ID NO:878, SEQ ID NO:880, SEQ ID NO:882, SEQ ID NO:884, SEQ ID NO:886, SEQ ID NO:888, SEQ ID NO:890, SEQ ID NO:892, SEQ ID NO:894, SEQ ID NO:896, SEQ ID NO:898, SEQ ID NO:900, SEQ ID NO:902, SEQ ID NO:904, SEQ ID NO:906, SEQ ID NO:908, SEQ ID NO:910, SEQ ID NO:912, SEQ ID NO:914, SEQ ID NO:916, SEQ ID NO:918, SEQ ID NO:920, SEQ ID NO:922, SEQ ID NO:924, SEQ ID NO:926, SEQ ID NO:928, SEQ ID NO:930, SEQ ID NO:932, SEQ ID NO:934, SEQ ID NO:936, SEQ ID NO:938, SEQ ID NO:940, SEQ ID NO:942, SEQ ID NO:944, SEQ ID NO:946, SEQ ID NO:948, SEQ ID NO:950, SEQ ID NO:952, SEQ ID NO:954, SEQ ID NO:956, SEQ ID NO:958, SEQ ID NO:960, SEQ ID NO:962, SEQ ID NO:964, SEQ ID NO:966, SEQ ID NO:968, SEQ ID NO:970, SEQ ID NO:972, SEQ ID NO:974, SEQ ID NO:976, SEQ ID NO:978, SEQ ID NO:980, SEQ ID NO:982, SEQ ID NO:984, SEQ ID NO:986, SEQ ID NO:988, SEQ ID NO:990 and/or SEQ ID NO:992, and subsequences thereof and variants thereof, e.g., at least about 10, 15, 20, 25, 30, 35, 40, 45, 50, 75, 100, 150, 200, 250, 300, 350, 400, 450, 500, 550, 600, 650, 700, 750, 800, 850, 900, 950, 1000, 1050, 1100, 1150, 1200, 1250, 1300, 1350, 1400, 1450, 1500 or more residues in length, or over the full length of an enzyme. Exemplary polypeptide or peptide sequences of the invention include sequence encoded by a nucleic acid of the invention. Exemplary polypeptide or peptide sequences of the invention include polypeptides or peptides specifically bound by an antibody of the invention. In one aspect, a polypeptide of the invention has at least one hydrolase activity, e.g., an esterase, acylase, lipase, phospholipase or protease activity. In one aspect, the activity is a regioselective and/or chemoselective activity.

[0034] Another aspect of the invention is an isolated or recombinant polypeptide or peptide including at least 10 consecutive bases of a polypeptide or peptide sequence of the invention, sequences substantially identical thereto, and the sequences complementary thereto.

[0035] In one aspect, the lipase activity comprises hydrolyzing a triacylglycerol (TAG), a diacylglycerol (DAG) or a monoacylglycerol (MAG). The lipase activity can comprise hydrolyzing a triacylglycerol to a diacylglycerol and a free fatty acid, or, hydrolyzing a triacylglycerol to a monoacylglycerol and free fatty acids, or, hydrolyzing a diacylglycerol to a monoacylglycerol and free fatty acids, or, hydrolyzing a monoacylglycerol to a free fatty acid and a glycerol. The lipase activity can comprise synthesizing a tryacylglycerol from a diacylglycerol or a monoacylglycerol and free fatty acids. The lipase activity can comprise synthesizing 1,3-dipalmitoyl-2-oleoylglycerol (POP), 1,3-distearoyl-2-oleoylglycerol (SOS), 1-palmitoyl-2-oleoyl-3-stearoylglycerol (POS) or 1-oleoyl-2,3-dimyristoylglycerol (OMM), long chain polyunsaturated fatty acids, arachidonic acid, docosahexaenoic acid (DHA) or eicosapentaenoic acid (EPA). The lipase activity can be triacylglycerol (TAG), diacylglycerol (DAG) or monoacylglycerol (MAG) position-specific. The lipase activity can be Sn2-specific, Sn1- or Sn3-specific. The lipase activity can be fatty acid specific. The lipase activity can comprise modifying oils by hydrolysis, alcoholysis, esterification, transesterification or interesterification. The lipase activity can be regio-specific or chemoselective. The lipase activity can comprise synthesis of enantiomerically pure chiral products. The lipase activity can comprise synthesis of umbelliferyl fatty acid (FA) esters.

[0036] In one aspect, the hydrolase activity can be thermostable. The polypeptide can retain a hydrolase activity under conditions comprising a temperature range of between about 37° C. to about 95° C., between about 55° C. to about 85° C., between about 70° C. to about 95° C., or between about 90° C. to about 95° C. In another aspect, the hydrolase activity can be thermotolerant. The polypeptide can retain a hydrolase activity after exposure to a temperature in the range from greater than 37° C. to about 95° C., or in the range from greater than 55° C. to about 85° C. In one aspect, the polypeptide can retain a hydrolase activity after exposure to a temperature in the range from greater than 90° C. to about 95° C. at pH 4.5.

[0037] In one aspect, the isolated or recombinant polypeptide can comprise the polypeptide of the invention that lacks a signal sequence. In one aspect, the isolated or recombinant polypeptide can comprise the polypeptide of the invention comprising a heterologous signal sequence, such as a heterologous hydrolase or non-hydrolase signal sequence. In one aspect, the invention provides chimeric proteins comprising a first domain comprising a signal sequence of the invention and at least a second domain. The protein can be a fusion protein. The second domain can comprise an enzyme. The enzyme can be a hydrolase (e.g., a hydrolase of the invention, or, another hydrolase).

[0038] In one aspect, the hydrolase activity comprises a specific activity at about 37° C. in the range from about 100 to about 1000 units per milligram of protein. In another aspect, the hydrolase activity comprises a specific activity from about 500 to about 750 units per milligram of protein. Alternatively, the hydrolase activity comprises a specific activity at 37° C. in the range from about 500 to about 1200 units per milligram of protein. In one aspect, the hydrolase activity comprises a specific activity at 37° C. in the range from about 750 to about 1000 units per milligram of protein. In another aspect, the thermotolerance comprises retention of at least half of the specific activity of the hydrolase at 37° C. after being heated to the elevated temperature. Alternatively, the thermotolerance can comprise retention of specific activity at 37° C. in the range from about 500 to about 1200 units per milligram of protein after being heated to the elevated temperature.

[0039] The invention provides the isolated or recombinant polypeptide of the invention, wherein the polypeptide comprises at least one glycosylation site. In one aspect, glycosylation can be an N-linked glycosylation. In one aspect, the polypeptide can be glycosylated after being expressed in a P. pastoris or a S. pombe.

[0040] In one aspect, the polypeptide can retain a hydrolase activity under acidic conditions comprising about pH 6.8, pH 6.5, pH 6, pH 5.5, pH 5, pH 4.5 or pH 4 or more acidic. In another aspect, the polypeptide can retain a hydrolase activity under alkaline conditions comprising about pH 7.3, pH 7.5 pH 8.0, pH 8.5, pH 9, pH 9.5, pH 10, pH 10.5 or pH 11 or more alkaline. In one aspect, the polypeptide can retain a hydrolase activity after exposure to acidic conditions comprising about pH 6.8, pH 6.5, pH 6, pH 5.5, pH 5, pH 4.5 or pH 4 or more acidic. In another aspect, the polypeptide can retain a hydrolase activity after exposure to alkaline conditions comprising about pH 7.3, pH 7.5 pH 8.0, pH 8.5, pH 9, pH 9.5, pH 10, pH 10.5 or pH 11 or more alkaline.

[0041] The invention provides protein preparations comprising a polypeptide of the invention, wherein the protein preparation comprises a liquid, a solid or a gel.

[0042] The invention provides heterodimers comprising a polypeptide of the invention and a second domain. In one aspect, the second domain can be a polypeptide and the heterodimer can be a fusion protein. In one aspect, the second domain can be an epitope or a tag. In one aspect, the invention provides homodimers comprising a polypeptide of the invention.

[0043] The invention provides immobilized polypeptides having a hydrolase activity, wherein the polypeptide comprises a polypeptide of the invention, a polypeptide encoded by a nucleic acid of the invention, or a polypeptide comprising a polypeptide of the invention and a second domain. In one aspect, the polypeptide can be immobilized on a cell, a metal, a resin, a polymer, a ceramic, a glass, a microelectrode, a graphitic particle, a bead, a gel, a plate, an array or a capillary tube.

[0044] The invention provides arrays comprising an immobilized nucleic acid of the invention. The invention provides arrays comprising an antibody of the invention.

[0045] The invention provides isolated or recombinant antibodies that specifically bind to a polypeptide of the invention or to a polypeptide encoded by a nucleic acid of the invention. The antibody can be a monoclonal or a polyclonal antibody. The invention provides hybridomas comprising an antibody of the invention, e.g., an antibody that specifically binds to a polypeptide of the invention or to a polypeptide encoded by a nucleic acid of the invention.

[0046] The invention provides food supplements for an animal comprising a polypeptide of the invention, e.g., a polypeptide encoded by the nucleic acid of the invention. In one aspect, the polypeptide in the food supplement can be glycosylated. The invention provides edible enzyme delivery matrices comprising a polypeptide of the invention, e.g., a polypeptide encoded by the nucleic acid of the invention. In one aspect, the delivery matrix comprises a pellet. In one aspect, the polypeptide can be glycosylated. In one aspect, the hydrolase activity is thermotolerant. In another aspect, the hydrolase activity is thermostable.

[0047] The invention provides method of isolating or identifying a polypeptide having a hydrolase activity comprising the steps of: (a) providing an antibody of the invention; (b) providing a sample comprising polypeptides; and (c) contacting the sample of step (b) with the antibody of step (a) under conditions wherein the antibody can specifically bind to the polypeptide, thereby isolating or identifying a polypeptide having a hydrolase activity.

[0048] The invention provides methods of making an anti-hydrolase antibody comprising administering to a non-human animal a nucleic acid of the invention or a polypeptide of the invention or subsequences thereof in an amount sufficient to generate a humoral immune response, thereby making an anti-hydrolase antibody. The invention provides methods of making an anti-hydrolase immune comprising administering to a non-human animal a nucleic acid of the invention or a polypeptide of the invention or subsequences thereof in an amount sufficient to generate an immune response.

[0049] The invention provides methods of producing a recombinant polypeptide comprising the steps of: (a) providing a nucleic acid of the invention operably linked to a promoter; and (b) expressing the nucleic acid of step (a) under conditions that allow expression of the polypeptide, thereby producing a recombinant polypeptide. In one aspect, the method can further comprise transforming a host cell with the nucleic acid of step (a) followed by expressing the nucleic acid of step (a), thereby producing a recombinant polypeptide in a transformed cell.

[0050] The invention provides methods for identifying a polypeptide having a hydrolase activity comprising the following steps: (a) providing a polypeptide of the invention; or a polypeptide encoded by a nucleic acid of the invention; (b) providing a hydrolase substrate; and (c) contacting the polypeptide or a fragment or variant thereof of step (a) with the substrate of step (b) and detecting a decrease in the amount of substrate or an increase in the amount of a reaction product, wherein a decrease in the amount of the substrate or an increase in the amount of the reaction product detects a polypeptide having a hydrolase activity. In alternative aspects, the substrate can be a poly-unsaturated fatty acid (PUFA), a diacylglyceride, e.g., a 1,3-diacyl glyceride (DAG), a monoglyceride, e.g., 2-monoglyceride (MAG) or a triacylglyceride (TAG).

[0051] The invention provides methods for identifying a hydrolase substrate comprising the following steps: (a) providing a polypeptide of the invention; or a polypeptide encoded by a nucleic acid of the invention; (b) providing a test substrate; and (c) contacting the polypeptide of step (a) with the test substrate of step (b) and detecting a decrease in the amount of substrate or an increase in the amount of reaction product, wherein a decrease in the amount of the substrate or an increase in the amount of a reaction product identifies the test substrate as a hydrolase substrate.

[0052] The invention provides methods of determining whether a test compound specifically binds to a polypeptide comprising the following steps: (a) expressing a nucleic acid or a vector comprising the nucleic acid under conditions permissive for translation of the nucleic acid to a polypeptide, wherein the nucleic acid comprises a nucleic acid of the invention, or, providing a polypeptide of the invention; (b) providing a test compound; (c) contacting the polypeptide with the test compound; and (d) determining whether the test compound of step (b) specifically binds to the polypeptide.

[0053] The invention provides methods for identifying a modulator of a hydrolase activity comprising the following steps: (a) providing a polypeptide of the invention or a polypeptide encoded by a nucleic acid of the invention; (b) providing a test compound; (c) contacting the polypeptide of step (a) with the test compound of step (b) and measuring an activity of the hydrolase, wherein a change in the hydrolase activity measured in the presence of the test compound compared to the activity in the absence of the test compound provides a determination that the test compound modulates the hydrolase activity. In one aspect, the hydrolase activity can be measured by providing a hydrolase substrate and detecting a decrease in the amount of the substrate or an increase in the amount of a reaction product, or, an increase in the amount of the substrate or a decrease in the amount of a reaction product. A decrease in the amount of the substrate or an increase in the amount of the reaction product with the test compound as compared to the amount of substrate or reaction product without the test compound identifies the test compound as an activator of hydrolase activity. An increase in the amount of the substrate or a decrease in the amount of the reaction product with the test compound as compared to the amount of substrate or reaction product without the test compound identifies the test compound as an inhibitor of hydrolase activity.

[0054] The invention provides computer systems comprising a processor and a data storage device wherein said data storage device has stored thereon a polypeptide sequence or a nucleic acid sequence of the invention (e.g., a polypeptide encoded by a nucleic acid of the invention). In one aspect, the computer system can further comprise a sequence comparison algorithm and a data storage device having at least one reference sequence stored thereon. In another aspect, the sequence comparison algorithm comprises a computer program that indicates polymorphisms. In one aspect, the computer system can further comprise an identifier that identifies one or more features in said sequence. The invention provides computer readable media having stored thereon a polypeptide sequence or a nucleic acid sequence of the invention. The invention provides methods for identifying a feature in a sequence comprising the steps of: (a) reading the sequence using a computer program which identifies one or more features in a sequence, wherein the sequence comprises a polypeptide sequence or a nucleic acid sequence of the invention; and (b) identifying one or more features in the sequence with the computer program. The invention provides methods for comparing a first sequence to a second sequence comprising the steps of: (a) reading the first sequence and the second sequence through use of a computer program which compares sequences, wherein the first sequence comprises a polypeptide sequence or a nucleic acid sequence of the invention; and (b) determining differences between the first sequence and the second sequence with the computer program. The step of determining differences between the first sequence and the second sequence can further comprise the step of identifying polymorphisms. In one aspect, the method can further comprise an identifier that identifies one or more features in a sequence. In another aspect, the method can comprise reading the first sequence using a computer program and identifying one or more features in the sequence.

[0055] The invention provides methods for isolating or recovering a nucleic acid encoding a polypeptide having a hydrolase activity from an environmental sample comprising the steps of: (a) providing an amplification primer sequence pair for amplifying a nucleic acid encoding a polypeptide having a hydrolase activity, wherein the primer pair is capable of amplifying a nucleic acid of the invention; (b) isolating a nucleic acid from the environmental sample or treating the environmental sample such that nucleic acid in the sample is accessible for hybridization to the amplification primer pair; and, (c) combining the nucleic acid of step (b) with the amplification primer pair of step (a) and amplifying nucleic acid from the environmental sample, thereby isolating or recovering a nucleic acid encoding a polypeptide having a hydrolase activity from an environmental sample. One or each member of the amplification primer sequence pair can comprise an oligonucleotide comprising at least about 10 to 50 consecutive bases of a sequence of the invention.

[0056] The invention provides methods for isolating or recovering a nucleic acid encoding a polypeptide having a hydrolase activity from an environmental sample comprising the steps of: (a) providing a polynucleotide probe comprising a nucleic acid of the invention or a subsequence thereof; (b) isolating a nucleic acid from the environmental sample or treating the environmental sample such that nucleic acid in the sample is accessible for hybridization to a polynucleotide probe of step (a); (c) combining the isolated nucleic acid or the treated environmental sample of step (b) with the polynucleotide probe of step (a); and (d) isolating a nucleic acid that specifically hybridizes with the polynucleotide probe of step (a), thereby isolating or recovering a nucleic acid encoding a polypeptide having a hydrolase activity from an environmental sample. The environmental sample can comprise a water sample, a liquid sample, a soil sample, an air sample or a biological sample. In one aspect, the biological sample can be derived from a bacterial cell, a protozoan cell, an insect cell, a yeast cell, a plant cell, a fungal cell or a mammalian cell.

[0057] The invention provides methods of generating a variant of a nucleic acid encoding a polypeptide having a hydrolase activity comprising the steps of: (a) providing a template nucleic acid comprising a nucleic acid of the invention; and (b) modifying, deleting or adding one or more nucleotides in the template sequence, or a combination thereof, to generate a variant of the template nucleic acid. In one aspect, the method can further comprise expressing the variant nucleic acid to generate a variant hydrolase polypeptide. The modifications, additions or deletions can be introduced by a method comprising error-prone PCR, shuffling, oligonucleotide-directed mutagenesis, assembly PCR, sexual PCR mutagenesis, in vivo mutagenesis, cassette mutagenesis, recursive ensemble mutagenesis, exponential ensemble mutagenesis, site-specific mutagenesis, gene reassembly, gene site saturated mutagenesis (GSSM), synthetic ligation reassembly (SLR) or a combination thereof. In another aspect, the modifications, additions or deletions are introduced by a method comprising recombination, recursive sequence recombination, phosphothioate-modified DNA mutagenesis, uracil-containing template mutagenesis, gapped duplex mutagenesis, point mismatch repair mutagenesis, repair-deficient host strain mutagenesis, chemical mutagenesis, radiogenic mutagenesis, deletion mutagenesis, restriction-selection mutagenesis, restriction-purification mutagenesis, artificial gene synthesis, ensemble mutagenesis, chimeric nucleic acid multimer creation and a combination thereof.

[0058] In one aspect, the method can be iteratively repeated until a hydrolase having an altered or different activity or an altered or different stability from that of a polypeptide encoded by the template nucleic acid is produced. In one aspect, the variant hydrolase polypeptide is thermotolerant, and retains some activity after being exposed to an elevated temperature. In another aspect, the variant hydrolase polypeptide has increased glycosylation as compared to the hydrolase encoded by a template nucleic acid. Alternatively, the variant hydrolase polypeptide has a hydrolase activity under a high temperature, wherein the hydrolase encoded by the template nucleic acid is not active under the high temperature. In one aspect, the method can be iteratively repeated until a hydrolase coding sequence having an altered codon usage from that of the template nucleic acid is produced. In another aspect, the method can be iteratively repeated until a hydrolase gene having higher or lower level of message expression or stability from that of the template nucleic acid is produced.

[0059] The invention provides methods for modifying codons in a nucleic acid encoding a polypeptide having a hydrolase activity to increase its expression in a host cell, the method comprising the following steps: (a) providing a nucleic acid of the invention encoding a polypeptide having a hydrolase activity; and, (b) identifying a non-preferred or a less preferred codon in the nucleic acid of step (a) and replacing it with a preferred or neutrally used codon encoding the same amino acid as the replaced codon, wherein a preferred codon is a codon over-represented in coding sequences in genes in the host cell and a non-preferred or less preferred codon is a codon under-represented in coding sequences in genes in the host cell, thereby modifying the nucleic acid to increase its expression in a host cell.

[0060] The invention provides methods for modifying codons in a nucleic acid encoding a polypeptide having a hydrolase activity; the method comprising the following steps: (a) providing a nucleic acid of the invention; and, (b) identifying a codon in the nucleic acid of step (a) and replacing it with a different codon encoding the same amino acid as the replaced codon, thereby modifying codons in a nucleic acid encoding a hydrolase.

[0061] The invention provides methods for modifying codons in a nucleic acid encoding a polypeptide having a hydrolase activity to increase its expression in a host cell, the method comprising the following steps: (a) providing a nucleic acid of the invention encoding a hydrolase polypeptide; and, (b) identifying a non-preferred or a less preferred codon in the nucleic acid of step (a) and replacing it with a preferred or neutrally used codon encoding the same amino acid as the replaced codon, wherein a preferred codon is a codon over-represented in coding sequences in genes in the host cell and a non-preferred or less preferred codon is a codon under-represented in coding sequences in genes in the host cell, thereby modifying the nucleic acid to increase its expression in a host cell.

[0062] The invention provides methods for modifying a codon in a nucleic acid encoding a polypeptide having a hydrolase activity to decrease its expression in a host cell, the method comprising the following steps: (a) providing a nucleic acid of the invention; and (b) identifying at least one preferred codon in the nucleic acid of step (a) and replacing it with a non-preferred or less preferred codon encoding the same amino acid as the replaced codon, wherein a preferred codon is a codon over-represented in coding sequences in genes in a host cell and a non-preferred or less preferred codon is a codon under-represented in coding sequences in genes in the host cell, thereby modifying the nucleic acid to decrease its expression in a host cell. In one aspect, the host cell can be a bacterial cell, a fungal cell, an insect cell, a yeast cell, a plant cell or a mammalian cell.

[0063] The invention provides methods for producing a library of nucleic acids encoding a plurality of modified hydrolase active sites or substrate binding sites, wherein the modified active sites or substrate binding sites are derived from a first nucleic acid comprising a sequence encoding a first active site or a first substrate binding site the method comprising the following steps: (a) providing a first nucleic acid encoding a first active site or first substrate binding site, wherein the first nucleic acid sequence comprises a sequence that hybridizes under stringent conditions to a nucleic acid of the invention, and the nucleic acid encodes a hydrolase active site or a hydrolase substrate binding site; (b) providing a set of mutagenic oligonucleotides that encode naturally-occurring amino acid variants at a plurality of targeted codons in the first nucleic acid; and, (c) using the set of mutagenic oligonucleotides to generate a set of active site-encoding or substrate binding site-encoding variant nucleic acids encoding a range of amino acid variations at each amino acid codon that was mutagenized, thereby producing a library of nucleic acids encoding a plurality of modified hydrolase active sites or substrate binding sites. In one aspect, the method comprises mutagenizing the first nucleic acid of step (a) by a method comprising an optimized directed evolution system, gene site-saturation mutagenesis (GSSM), synthetic ligation reassembly (SLR), error-prone PCR, shuffling, oligonucleotide-directed mutagenesis, assembly PCR, sexual PCR mutagenesis, in vivo mutagenesis, cassette mutagenesis, recursive ensemble mutagenesis, exponential ensemble mutagenesis, site-specific mutagenesis, gene reassembly, gene site saturated mutagenesis (GSSM), synthetic ligation reassembly (SLR) and a combination thereof. In another aspect, the method comprises mutagenizing the first nucleic acid of step (a) or variants by a method comprising recombination, recursive sequence recombination, phosphothioate-modified DNA mutagenesis, uracil-containing template mutagenesis, gapped duplex mutagenesis, point mismatch repair mutagenesis, repair-deficient host strain mutagenesis, chemical mutagenesis, radiogenic mutagenesis, deletion mutagenesis, restriction-selection mutagenesis, restriction-purification mutagenesis, artificial gene synthesis, ensemble mutagenesis, chimeric nucleic acid multimer creation and a combination thereof.

[0064] The invention provides methods for making a small molecule comprising the following steps: (a) providing a plurality of biosynthetic enzymes capable of synthesizing or modifying a small molecule, wherein one of the enzymes comprises a hydrolase enzyme encoded by a nucleic acid of the invention; (b) providing a substrate for at least one of the enzymes of step (a); and (c) reacting the substrate of step (b) with the enzymes under conditions that facilitate a plurality of biocatalytic reactions to generate a small molecule by a series of biocatalytic reactions. The invention provides methods for modifying a small molecule comprising the following steps: (a) providing a hydrolase enzyme, wherein the enzyme comprises a polypeptide of the invention, or, a polypeptide encoded by a nucleic acid of the invention, or a subsequence thereof; (b) providing a small molecule; and (c) reacting the enzyme of step (a) with the small molecule of step (b) under conditions that facilitate an enzymatic reaction catalyzed by the hydrolase enzyme, thereby modifying a small molecule by a hydrolase enzymatic reaction. In one aspect, the method can comprise a plurality of small molecule substrates for the enzyme of step (a), thereby generating a library of modified small molecules produced by at least one enzymatic reaction catalyzed by the hydrolase enzyme. In one aspect, the method can comprise a plurality of additional enzymes under conditions that facilitate a plurality of biocatalytic reactions by the enzymes to form a library of modified small molecules produced by the plurality of enzymatic reactions. In another aspect, the method can further comprise the step of testing the library to determine if a particular modified small molecule which exhibits a desired activity is present within the library. The step of testing the library can further comprise the steps of systematically eliminating all but one of the biocatalytic reactions used to produce a portion of the plurality of the modified small molecules within the library by testing the portion of the modified small molecule for the presence or absence of the particular modified small molecule with a desired activity, and identifying at least one specific biocatalytic reaction that produces the particular modified small molecule of desired activity.

[0065] The invention provides methods for determining a functional fragment of a hydrolase enzyme comprising the steps of: (a) providing a hydrolase enzyme, wherein the enzyme comprises a polypeptide of the invention, or a polypeptide encoded by a nucleic acid of the invention, or a subsequence thereof; and (b) deleting a plurality of amino acid residues from the sequence of step (a) and testing the remaining subsequence for a hydrolase activity, thereby determining a functional fragment of a hydrolase enzyme. In one aspect, the hydrolase activity is measured by providing a hydrolase substrate and detecting a decrease in the amount of the substrate or an increase in the amount of a reaction product.

[0066] The invention provides methods for whole cell engineering of new or modified phenotypes by using real-time metabolic flux analysis, the method comprising the following steps: (a) making a modified cell by modifying the genetic composition of a cell, wherein the genetic composition is modified by addition to the cell of a nucleic acid of the invention; (b) culturing the modified cell to generate a plurality of modified cells; (c) measuring at least one metabolic parameter of the cell by monitoring the cell culture of step (b) in real time; and, (d) analyzing the data of step (c) to determine if the measured parameter differs from a comparable measurement in an unmodified cell under similar conditions, thereby identifying an engineered phenotype in the cell using real-time metabolic flux analysis. In one aspect, the genetic composition of the cell can be modified by a method comprising deletion of a sequence or modification of a sequence in the cell, or, knocking out the expression of a gene. In one aspect, the method can further comprise selecting a cell comprising a newly engineered phenotype. In another aspect, the method can comprise culturing the selected cell, thereby generating a new cell strain comprising a newly engineered phenotype.

[0067] The invention provides methods of increasing thermotolerance or thermostability of a hydrolase polypeptide, the method comprising glycosylating a hydrolase polypeptide, wherein the polypeptide comprises at least thirty contiguous amino acids of a polypeptide of the invention; or a polypeptide encoded by a nucleic acid sequence of the invention, thereby increasing the thermotolerance or thermostability of the hydrolase polypeptide. In one aspect, the hydrolase specific activity can be thermostable or thermotolerant at a temperature in the range from greater than about 37° C. to about 95° C.

[0068] The invention provides methods for overexpressing a recombinant hydrolase polypeptide in a cell comprising expressing a vector comprising a nucleic acid comprising a nucleic acid of the invention or a nucleic acid sequence of the invention, wherein the sequence identities are determined by analysis with a sequence comparison algorithm or by visual inspection, wherein overexpression is effected by use of a high activity promoter, a dicistronic vector or by gene amplification of the vector.

[0069] The invention provides detergent compositions comprising a polypeptide of the invention or a polypeptide encoded by a nucleic acid of the invention, wherein the polypeptide comprises a hydrolase activity, e.g., an esterase, acylase, lipase, phospholipase or protease activity. In one aspect, the hydrolase can be a nonsurface-active hydrolase. In another aspect, the hydrolase can be a surface-active hydrolase.

[0070] The invention provides methods for washing an object comprising the following steps: (a) providing a composition comprising a polypeptide having a hydrolase activity, e.g., an esterase, acylase, lipase, phospholipase or protease activity, wherein the polypeptide comprises: a polypeptide of the invention or a polypeptide encoded by a nucleic acid of the invention; (b) providing an object; and (c) contacting the polypeptide of step (a) and the object of step (b) under conditions wherein the composition can wash the object.

[0071] The invention provides methods of making a transgenic plant comprising the following steps: (a) introducing a heterologous nucleic acid sequence into the cell, wherein the heterologous nucleic sequence comprises a nucleic acid sequence of the invention, thereby producing a transformed plant cell; and (b) producing a transgenic plant from the transformed cell. In one aspect, the step (a) can further comprise introducing the heterologous nucleic acid sequence by electroporation or microinjection of plant cell protoplasts. In another aspect, the step (a) can further comprise introducing the heterologous nucleic acid sequence directly to plant tissue by DNA particle bombardment. Alternatively, the step (a) can further comprise introducing the heterologous nucleic acid sequence into the plant cell DNA using an Agrobacterium tumefaciens host. In one aspect, the plant cell can be a potato, corn, rice, wheat, tobacco, or barley cell.

[0072] The invention provides methods of expressing a heterologous nucleic acid sequence in a plant cell comprising the following steps: (a) transforming the plant cell with a heterologous nucleic acid sequence operably linked to a promoter, wherein the heterologous nucleic sequence comprises a nucleic acid of the invention; (b) growing the plant under conditions wherein the heterologous nucleic acids sequence is expressed in the plant cell.

[0073] The invention provides signal sequences comprising or consisting of a peptide having a subsequence of a polypeptide of the invention. The invention provides a chimeric protein comprising a first domain comprising a signal sequence of the invention and at least a second domain. The protein can be a fusion protein. The second domain can comprise an enzyme. The enzyme can be a hydrolase.

[0074] The invention provides method for biocatalytic synthesis of a structured lipid comprising the following steps: (a) providing a hydrolase of the invention; (b) providing a composition comprising a triacylglyceride (TAG); (c) contacting the polypeptide of step (a) with the composition of step (b) under conditions wherein the polypeptide hydrolyzes an acyl residue at the Sn2 position of the triacylglyceride (TAG), thereby producing a 1,3-diacylglyceride (DAG); (d) providing an R1 ester; (e) providing an R1-specific hydrolase, and (f) contacting the 1,3-DAG of step (c) with the R1 ester of step (d) and the R1-specific hydrolase of step (e) under conditions wherein the R1-specific hydrolase catalyzes esterification of the Sn2 position, thereby producing the structured lipid. The hydrolase can be an Sn2-specific lipase. The structured lipid can comprise a cocoa butter alternative (CBA), a synthetic cocoa butter, a natural cocoa butter, 1,3-dipalmitoyl-2-oleoylglycerol (POP), 1,3-distearoyl-2-oleoylglycerol (SOS), 1-palmitoyl-2-oleoyl-3-stearoylglycerol (POS) or 1-oleoyl-2,3-dimyristoylglycerol (OMM).

[0075] The invention provides a method for biocatalytic synthesis of a structured lipid comprising the following steps: (a) providing a hydrolase of the invention; (b) providing a composition comprising a triacylglyceride (TAG); (c) contacting the polypeptide of step (a) with the composition of step (b) under conditions wherein the polypeptide hydrolyzes an acyl residue at the Sn1 or Sn3 position of the triacylglyceride (TAG), thereby producing a 1,2-DAG or 2,3-DAG; and (d) promoting of acyl migration in the 1,2-DAG or 2,3-DAG of the step (c) under kinetically controlled conditions, thereby producing a 1,3-DAG. The method can further comprise providing an R1 ester and an R1-specific lipase, and contacting the 1,3-DAG of step (d) with the R1 ester and the R1-specific lipase under conditions wherein the R1-specific lipase catalyzes esterification of the Sn2 position, thereby producing a structured lipid. The lipase can be an Sn1 or an Sn3-specific lipase. The structured lipid can comprise a cocoa butter alternative (CBA), a synthetic cocoa butter, a natural cocoa butter, 1,3-dipalmitoyl-2-oleoylglycerol (POP), 1,3-distearoyl-2-oleoylglycerol (SOS), 1-palmitoyl-2-oleoyl-3-stearoylglycerol (POS) or 1-oleoyl-2,3-dimyristoylglycerol (OMM). In one aspect of the method, step (d) further comprises using ion exchange resins. The kinetically controlled conditions can comprise non-equilibrium conditions resulting in production of an end product having greater than a 2:1 ratio of 1,3-DAG to 2,3-DAG. The composition of step (b) can comprise a fluorogenic fatty acid (FA). The composition of step (b) can comprise an umbelliferyl FA ester. The end product can be enantiomerically pure.

[0076] The invention provides a method for preparation of an optical isomer of a propionic acid from a racemic ester of the propionic acid comprising the following steps: (a) providing a hydrolase of the invention, wherein the hydrolase is stereoselective for an optical isomer of the propionic acid; (b) providing racemic esters; (c) contacting the polypeptide of step (a) with the racemic esters of step (b) wherein the polypeptide can selectively catalyze the hydrolysis of the esters of step (b), thereby producing the optical isomer of the propionic acid. The optical isomer of the propionic acid can comprise an S(+) of 2-(6-methoxy-2-naphthyl) propionic acid and the racemic esters comprises racemic (R,S) esters of 2-(6-methoxy-2-naphthyl) propionic acid.

[0077] The invention provides a method for stereoselectively hydrolyzing racemic mixtures of esters of 2-substituted acids comprising the following steps: (a) providing a hydrolase of the invention, wherein the hydrolase is stereoselective; (b) providing a composition comprising a racemic mixture of esters of 2-substituted acids; and (c) contacting the polypeptide of step (a) with the composition of step (b) under conditions wherein the polypeptide of step (b) can selectively hydrolyze the esters. The hydrolase can be immobilized. The 2-substituted acid can comprise a 2-aryloxy substituted acid, an R-2-(4-hydroxyphenoxy)propionic acid or a 2-arylpropionic acid. The 2-substituted acid can comprise a ketoprofen.

[0078] The invention provides a method for oil or fat modification comprising the following steps: (a) providing a hydrolase of the invention; (b) providing an oil or fat, and (c) contacting the hydrolase of step (a) with the oil or fat of step (b) under conditions wherein the hydrolase can modify the oil or fat. The modification can comprise a hydrolase-catalyzed hydrolysis of the fat or oil. The hydrolysis can be a complete or a partial hydrolysis of the fat or oil. The oil can comprise a glycerol ester of a polyunsaturated fatty acid, or a fish, animal, or vegetable oil. The vegetable oil can comprise an olive, canola, sunflower, palm, soy or lauric oil or rice bran oil.

[0079] The invention provides a method for hydrolysis of polyunsaturated fatty acid (PUFA) esters comprising the following steps: (a) providing a hydrolase of the invention; (b) providing composition comprising a polyunsaturated fatty acid ester, and (c) contacting the hydrolase with the composition of step (b) under conditions wherein the hydrolase can hydrolyze the polyunsaturated fatty acid (PUFA) ester. The invention provides a method of selective hydrolysis of polyunsaturated fatty acids esters over saturated fatty acid esters comprising the following steps: (a) providing a hydrolase of the invention, wherein the hydrolase has a lipase activity and selectively hydrolyzes polyunsaturated fatty acid (PUFA) esters; (b) providing a composition comprising a mixture of polyunsaturated and saturated esters; and (c) contacting the polypeptide of step (a) with the composition of step (b) under conditions wherein the polypeptide can selectively catalyze the hydrolysis of polyunsaturated fatty acids esters.

[0080] The invention provides a method for preparing a food or a feed additive comprising polyunsaturated fatty acids (PUFA) comprising the following steps: (a) providing a hydrolase of the invention, wherein the hydrolase selectively hydrolyzes polyunsaturated fatty acid (PUFA) esters; (b) providing a composition comprising a PUFA ester; and (c) contacting the polypeptide of step (a) with the composition of step (b) under conditions wherein the polypeptide can selectively catalyze the hydrolysis of polyunsaturated fatty acid esters thereby producing the PUFA-containing food or feed additive.

[0081] The invention provides a method for treatment of latex comprising the following steps: (a) providing a hydrolase of the invention, wherein the polypeptide has selectivity for a saturated ester over an unsaturated ester, thereby converting the saturated ester to its corresponding acid and alcohol; (b) providing a latex composition comprising saturated and unsaturated esters; (c) contacting the hydrolase of step (a) with the composition of step (b) under conditions wherein the polypeptide can selectively hydrolyze saturated esters, thereby treating the latex. The ethyl propionate can be selectively hydrolyzed over ethyl acrylate. The latex composition of step (b) can comprise polymers containing acrylic, vinyl and unsaturated acid monomers, alkyl acrylate monomers, methyl acrylate, ethyl acrylate, propyl acrylate and butyl acrylate, acrylate acids, acrylic acid, methacrylic acid, crotonic acid, itaconic acid and mixtures thereof. The latex composition can be a hair fixative. The conditions of step (c) can comprise a pH in the range from about pH 4 to pH 8 and a temperature in the range from about 200 to about 50° C.

[0082] The invention provides a method for refining a lubricant comprising the following steps: (a) providing a composition comprising a hydrolase of the invention; (b) providing a lubricant; and (c) treating the lubricant with the hydrolase under conditions wherein the hydrolase can selective hydrolyze oils in the lubricant, thereby refining it. The lubricant can be a hydraulic oil.

[0083] The invention provides a method of treating a fabric comprising the following steps: (a) providing a composition comprising a hydrolase of the invention, wherein the hydrolase can selectively hydrolyze carboxylic esters; (b) providing a fabric; and (c) treating the fabric with the hydrolase under condition wherein the hydrolase can selectively hydrolyze carboxylic esters thereby treating the fabric. The treatment of the fabric can comprise improvement of the hand and drape of the final fabric, dyeing, obtaining flame retardancy, obtaining water repellency, obtaining optical brightness, or obtaining resin finishing. The fabric can comprise cotton, viscose, rayon, lyocell, flax, linen, ramie, all blends thereof, or blends thereof with polyesters, wool, polyamides acrylics or polyacrylics. The invention provides a fabric, yarn or fiber comprising a hydrolase of the invention, which can be adsorbed, absorbed or immobilized on the surface of the fabric, yarn or fiber.

[0084] The invention provides a method for removing or decreasing the amount of a food or oil stain comprising contacting a hydrolase of the invention with the food or oil stain under conditions wherein the hydrolase can hydrolyze oil or fat in the stain. The hydrolase can have an enhanced stability to denaturation by surfactants and to heat deactivation. The hydrolase can have a detergent or a laundry solution.

[0085] The invention provides a dietary composition comprising a hydrolase of the invention. The dietary composition can further comprise a nutritional base comprising a fat. The hydrolase can be activated by a bile salt. The dietary composition can further comprising a cow's milk-based infant formula. The hydrolase can hydrolyze long chain fatty acids. The invention provides a method of reducing fat content in milk or vegetable-based dietary compositions comprising the following steps: (a) providing a composition comprising a hydrolase of the invention; (b) providing a composition comprising a milk or a vegetable oil, and (c) treating the composition of step (b) with the hydrolase under conditions wherein the hydrolase can hydrolyze the oil or fat in the composition, thereby reducing its fat content. The invention provides a dietary composition for a human or non-ruminant animals comprising a nutritional base, wherein the base comprises a fat and no or little hydrolase, and an effective amount of a hydrolase as set forth in claim 56 to increase fat absorption and growth of human or non-ruminant animal.

[0086] The invention provides a method of catalyzing an interesterification reaction to produce new triglycerides comprising the following steps: (a) providing a composition comprising a hydrolase of the invention, wherein the hydrolase can catalyze an interesterification reaction; (b) providing a mixture of triglycerides and free fatty acids; (c) treating the composition of step (b) with the hydrolase under conditions wherein the hydrolase can catalyze exchange of free fatty acids with the acyl groups of triglycerides, thereby producing new triglycerides enriched in the added fatty acids. The hydrolase can be an Sn1,3-specific lipase. The invention provides a transesterification method for preparing a margarine oil having a low trans-acid and a low intermediate chain fatty acid content, comprising the following steps: (a) providing a transesterification reaction mixture comprising a stearic acid source material selected from the group consisting of stearic acid, stearic acid monoesters of low molecular weight monohydric alcohols and mixtures thereof, (b) providing a liquid vegetable oil; (c) providing a hydrolase of the invention, wherein the polypeptide comprises a 1,3-specific lipase activity; (d) transesterifying the stearic acid source material and the vegetable oil triglyceride, to substantially equilibrate the ester groups in the 1-, 3-positions of the glyceride component with non-glyceride fatty acid components of the reaction mixture, (e) separating transesterified free fatty acid components from glyceride components of the transesterification mixture to provide a transesterified margarine oil product and a fatty acid mixture comprising fatty acids, fatty acid monoesters or mixtures thereof released from the vegetable oil, and (f) hydrogenating the fatty acid mixture.

[0087] The invention provides a method for making a composition comprising 1-palmitoyl-3-stearoyl-2-monoleine (POSt) and 1,3-distearoyl-2-monoleine (StOSt) comprising providing a lipase as set forth in claim 56, wherein the lipase is capable of 1,3-specific lipase-catalyzed interesterification of 1,3-dipalmitoyl-2-monoleine (POP) with stearic acid or tristearin, to make a product enriched in the 1-palmitoyl-3-stearoyl-2-monoleine (POSt) or 1,3-distearoyl-2-monoleine (StOSt).

[0088] The invention provides a method for ameliorating or preventing lipopolysaccharide (LPS)-mediated toxicity comprising administering to a patient a pharmaceutical composition comprising a polypeptide of the invention. The invention provides a method for detoxifying an endotoxin comprising contacting the endotoxin with a polypeptide of the invention. The invention provides a method for deacylating a 2′ or a 3′ fatty acid chain from a lipid A comprising contacting the lipid A with a polypeptide of the invention.

[0089] The invention provides methods for hydrolyzing a composition comprising a cellulose or a lipophilic compound, comprising the steps of (a) providing a polypeptide of the invention having hydrolase activity, or a polypeptide having hydrolase activity encoded by a nucleic acid of the invention having; (b) contacting the cellulose or a lipophilic compound with the polypeptide having hydrolase activity under conditions wherein the polypeptide is enzymatically active. In one aspect, the polypeptide has lipase activity, and optionally the polypeptide has a sequence as set forth in SEQ ID NO:988, SEQ ID NO:986, SEQ ID NO:604, SEQ ID NO:92 or SEQ ID NO:48. The lipase activity can comprise the ability to hydrolyze both sterol esters and triglycerides, thereby generating sterols, glycerol and/or free fatty acids. The cellulose or lipophilic compound can comprise a pulp, a paper, a paper product, a wood, a wood product, groundwood, a paper or wood waste product, or any wood or cellulose-based product of manufacture, which includes, e.g., fiberboards, cardboards, pressed wood or pressed board, and the like. The hydrolysis of the cellulose using an enzyme of the invention can improves inter-fiber bonding of cellulose fibers. In one aspect, the methods comprise a paper-making process, and the inter-fiber bonding of cellulose fibers generated by the hydrolysis of the cellulose results in a stronger paper.

[0090] The invention provides methods for making paper comprising the steps of (a) providing a polypeptide of the invention having hydrolase activity, or a polypeptide having hydrolase activity encoded by a nucleic acid of the invention; (b) providing a compound comprising a cellulose; and (c) contacting the compound with the polypeptide having hydrolase activity under conditions wherein the polypeptide is enzymatically active; wherein optionally a chloroperoxidase enzyme is also added, and optionally the cellulose or lipophilic compound comprises a pulp, a paper, a paper product, a wood, groundwood, a wood product, or a paper or wood waste product.

[0091] The invention provides compositions comprising a cellulose or a lipophilic compound, wherein the compound comprises a recombinant polypeptide of the invention having hydrolase activity or the recombinant polypeptide is encoded by a nucleic acid of the invention. The polypeptide can have lipase activity, and optionally the polypeptide has a sequence as set forth in SEQ ID NO:988, SEQ ID NO:986, SEQ ID NO:604, SEQ ID NO:92 or SEQ ID NO:48. The composition can have lipase activity comprising the ability to hydrolyze both sterol esters and triglycerides, thereby generating sterols, glycerol and/or free fatty acids. In one aspect, the cellulose or lipophilic compound comprises a pulp, a kraft pulp, a paper, a paper product, a wood, groundwood, a wood product, or a paper or wood waste product.

[0092] The invention provides methods for generating a sterol, a glycerol or a free fatty acid by hydrolyzing a composition comprising a cellulose or a lipophilic compound, comprising the steps of (a) providing a polypeptide of the invention having hydrolase activity, or a polypeptide having hydrolase activity encoded by a nucleic acid of the invention, and a composition comprising a cellulose or a lipophilic compound; (b) contacting the composition with the polypeptide having hydrolase activity under conditions wherein the polypeptide is enzymatically active, thereby generating a sterol, a glycerol or a free fatty acid. The polypeptide can have lipase activity, and optionally the polypeptide has a sequence as set forth in SEQ ID NO:988, SEQ ID NO:986, SEQ ID NO:604, SEQ ID NO:92 or SEQ ID NO:48.

[0093] The invention provides methods for decreasing the amount of lipophilic extract (“pitch”) in a pulp or any cellulose-comprising (e.g., wood-based or plant-based) intermediate for making a product, including not only paper but related materials such as pressboard, cardboard and the like, comprising the steps of (a) providing a polypeptide of the invention having hydrolase activity, or a polypeptide having hydrolase activity encoded by a nucleic acid of the invention; (b) providing a compound comprising a cellulose-comprising composition, such as a pulp, wherein optionally pulp comprises a kraft pulp or a thermomechanical pulp (TMP); and (c) contacting the compound with the polypeptide having hydrolase activity under conditions wherein the polypeptide is enzymatically active, wherein optionally a chloroperoxidase enzyme is also added, and optionally the lipophilic extract comprises a cellulose or a lipophilic compound comprising a pulp, a paper, a paper product, a wood, a wood product, groundwood or a paper or wood waste product.

[0094] The details of one or more embodiments of the invention are set forth in the accompanying drawings and the description below. Other features, objects, and advantages of the invention will be apparent from the description and drawings, and from the claims.

[0095] All publications, patents, patent applications, GenBank sequences and ATCC deposits, cited herein are hereby expressly incorporated by reference for all purposes.

### DESCRIPTION OF DRAWINGS

[0096] The following drawings are illustrative of embodiments of the invention and are not meant to limit the scope of the invention as encompassed by the claims.

[0097] The patent or application file contains at least one drawing executed in color. Copies of this patent or patent application publication with color drawing(s) will be provided by the Office upon request and payment of the necessary fee.

[0098] FIG. 1 is a block diagram of a computer system.

[0099] FIG. 2 is a flow diagram illustrating one aspect of a process for comparing a new nucleotide or protein sequence with a database of sequences in order to determine the homology levels between the new sequence and the sequences in the database.

[0100] FIG. 3 is a flow diagram illustrating one aspect of a process in a computer for determining whether two sequences are homologous.

[0101] FIG. 4 is a flow diagram illustrating one aspect of an identifier process 300 for detecting the presence of a feature in a sequence.

[0102] FIG. 5 illustrates an exemplary method of the invention to test for lipase activity, a calorimetric lipase assay, as described in Example 1, below.

[0103] FIG. 6 illustrates an exemplary method of the invention using an Sn2 regio-specific lipase in the synthesis of structured lipids.

[0104] FIG. 7 illustrates an exemplary method of the invention, a “Forced Migration Methodology” for the structured synthesis of lipids, as described in detail in Example 2, below.

[0105] FIG. 8 illustrates an exemplary method comprising use of lipases of the invention to synthesize cocoa butter alternatives, as described in detail below.

[0106] FIG. 9A and FIG. 9B illustrate exemplary methods of the invention comprising synthesizing PUFA-containing sTAGs (FIG. 9A, top) and 2-PUFA sMAGs and purified PUFAs (FIG. 9B, bottom).

[0107] FIG. 10 illustrates an exemplary method comprising a coupled enzyme assay, as discussed in detail, below.

[0108] FIG. 11 illustrates an exemplary growth-kill assay, as discussed in Example 6, below.

[0109] FIG. 12 illustrates data of various esterification reactions in the synthesis of 1,3-DCy, as discussed in Example 7, below.

[0110] FIG. 13 summarizes data showing the effect of substrate ratio on esterification between glycerol and caprylic acid, as discussed in Example 7, below.

[0111] FIG. 14 summarizes data of various synthesis of 1,3-dilaurin, as discussed in Example 7, below.

[0112] FIG. 15 summarizes the effect of substrate ration on esterification of glycerol and lauric acid in n-hexane, as discussed in Example 7, below.

[0113] FIG. 16 summarizes the synthesis of 1,3-dipalmitin, as discussed in Example 7, below.

[0114] FIG. 17 summarizes data for the esterification of glycerol and palmitic (C16:O) or stearic (C18:0) acid, as discussed in Example 7, below.

[0115] FIG. 18 shows data from alcoholysis reaction, as discussed in Example 7, below.

[0116] FIG. 19 illustrates data from the hydrolysis of trilaurin, as discussed in Example 7, below.

[0117] FIG. 20 shows the effect of trilaurin:water ratio on hydrolysis of trilaurin, as discussed in Example 7, below.

[0118] FIG. 21 summarizes data showing the effect of organic solvents on hydrolysis of trilaurin, as discussed in Example 7, below.

[0119] FIG. 22 illustrates data from the alcoholysis and hydrolysis of coconut oil in organic solvent, as discussed in Example 7, below.

[0120] FIG. 23 shows the effect of oleic acid on acyl migration of 1,2-dipalmitin in n-hexane at room temperature, as discussed in Example 7, below.

[0121] FIG. 24 shows the effect of the amount of anion exchanger on acyl migration of 1,2-dipalmitin in n-hexane, as discussed in Example 7, below.

[0122] FIG. 25 shows data from the esterification of 1,3-dicaprylin and oleic acid vinyl ester in n-hexane by an immobilized lipase from a Pseudomonas sp. (Amano PS-D, Amano Enzyme USA, Elgin, Ill.), as discussed in Example 7, below.

[0123] FIG. 26 shows data from the esterification of 1,3-DG and oleic acid or oleic acid vinyl ester in n-hexane by an immobilized lipase from a Pseudomonas sp. (Amano PS-D, Amano Enzyme USA, Elgin, Ill.), as discussed in Example 7, below.

[0124] FIG. 27 illustrates an exemplary forced migration reaction of the invention, as discussed below.

[0125] FIG. 28 illustrates an exemplary synthesis of a triglyceride mixture composed of POS (Palmitic-Oleic-Stearic), POP (Palmitic-Oleic-Palmitic) and SOS (Stearic-Oleic-Stearic) from glycerol, as discussed below.

[0126] FIG. 29 illustrates an exemplary synthesis where stearate and palmitate are mixed together to generate mixtures of DAGs which are subsequently acylated with oleate to give components of cocoa butter equivalents, as discussed below.

[0127] FIG. 30 is a chart describing selected characteristics of exemplary nucleic acids and polypeptides of the invention, as described in further detail, below.

[0128] FIG. 31 schematically illustrates data from a two enzyme system of the invention, as described in Example 10, below.

[0129] FIG. 32 schematically illustrates data from studies showing the dose dependency of an exemplary lipase of the invention on tensile handsheet strength, as described in Example 12, below.

[0130] FIG. 33 schematically illustrates data from studies on lipophilic extracts from handsheets to analyze tensile strength using normal phase HPLC with ELSD detection method, as described in Example 12, below; FIG. 33 shows the composition and amount of lipophilic extracts in the handsheets.

[0131] FIG. 34 is a table summarizing characteristics of exemplary enzymes of the invention, as described in detail in Example 12, below.

[0132] FIG. 35 schematically illustrates data from tensile strength studies using unbleached post-O₂ Kraft pulp, as described in detail in Example 12, below.

[0133] FIG. 36 schematically illustrates data from tensile strength and paper elasticity (“elongation” in nm) studies with increasing Kraft pulp additions, as described in detail in Example 12, below.

[0134] FIG. 37 schematically illustrates data from tensile strength studies using Irving TMP (New Brunswick, Canada), which shows that paper strength is directly correlated to weight of the paper, as described in detail in Example 12, below.

[0135] FIG. 38 schematically illustrates data from tensile strength and paper elasticity (“elongation” in nm) studies with increasing Handsheet weight (1.25 g, 2.5 g, 5.0 g; grams O.D. pulp), as described in detail in Example 12, below.

[0136] FIG. 39 schematically illustrates data from tensile strength studies with two blends of TMP/kraft pulp blend, only one of which was treated with an exemplary enzyme of the invention, as described in detail in Example 12, below.

[0137] FIG. 40 illustrates the extractive (“pitch”) content of the two blends of pulp whose tensile strength was shown in FIG. 39, as described in detail in Example 12, below.

[0138] Like reference symbols in the various drawings indicate like elements.

### DETAILED DESCRIPTION

[0139] The invention provides hydrolases, polynucleotides encoding them, and methods of making and using these polynucleotides and polypeptides. In one aspect, the invention is directed to polypeptides, e.g., enzymes, having a hydrolase activity, e.g., an esterase, acylase, lipase, phospholipase or protease activity, including thermostable and thermotolerant hydrolase activity, and polynucleotides encoding these enzymes, and making and using these polynucleotides and polypeptides. The hydrolase activities of the polypeptides and peptides of the invention include esterase activity, lipase activity (hydrolysis of lipids), acidolysis reactions (to replace an esterified fatty acid with a free fatty acid), transesterification reactions (exchange of fatty acids between triglycerides), ester synthesis, ester interchange reactions, phospholipase activity (e.g., phospholipase A, B, C and D activity, patatin activity, lipid acyl hydrolase (LAH) activity) and protease activity (hydrolysis of peptide bonds). The polypeptides of the invention can be used in a variety of pharmaceutical, agricultural and industrial contexts, including the manufacture of cosmetics and nutraceuticals. In another aspect, the polypeptides of the invention are used to synthesize enantiomerically pure chiral products. The polypeptides of the invention can be used in a variety of pharmaceutical, agricultural and industrial contexts, including the manufacture of cosmetics and nutraceuticals.

[0140] Enzymes of the invention can be highly selective catalysts. They can have the ability to catalyze reactions with stereo-, regio-, and chemo-selectivities not possible in conventional synthetic chemistry. Enzymes of the invention can be versatile. In various aspects, they can function in organic solvents, operate at extreme pHs (for example, high pHs and low pHs) extreme temperatures (for example, high temperatures and low temperatures), extreme salinity levels (for example, high salinity and low salinity), and catalyze reactions with compounds that are structurally unrelated to their natural, physiological substrates.

[0141] Hydrolases of the Invention Having Lipase Activity

[0142] In one aspect, the polypeptides of the invention have lipase activity and can be used as lipases, e.g., in the biocatalytic synthesis of structured lipids (lipids that contain a defined set of fatty acids distributed in a defined manner on the glycerol backbone), including cocoa butter alternatives, poly-unsaturated fatty acids (PUFAs), 1,3-diacyl glycerides (DAGs), 2-monoglycerides (MAGs) and triacylglycerides (TAGs), such as 1,3-dipalmitoyl-2-oleoylglycerol (POP), 1,3-distearoyl-2-oleoylglycerol (SOS), 1-palmitoyl-2-oleoyl-3-stearoylglycerol (POS) or 1-oleoyl-2,3-dimyristoylglycerol (OMM), long chain polyunsaturated fatty acids such as arachidonic acid, docosahexaenoic acid (DHA) and eicosapentaenoic acid (EPA).

[0143] In one aspect, the invention provides an exemplary synthesis (using lipases of the invention) of a triglyceride mixture composed of POS (Palmitic-Oleic-Stearic), POP (Palmitic-Oleic-Palmitic) and SOS (Stearic-Oleic-Stearic) from glycerol, as illustrated in FIG. 28. This exemplary synthesis uses free fatty acids versus fatty acid esters. In one aspect, this reaction can be performed in one pot with sequential addition of fatty acids using crude glycerol and free fatty acids and fatty acid esters. In one aspect, stearate and palmitate are mixed together to generate mixtures of DAGs. In one aspect, the diacylglycerides are subsequently acylated with oleate to give components of cocoa butter equivalents, as illustrated in FIG. 29. In alternative aspects, the proportions of POS, POP and SOS can be varied according to: stearate to palmitate ratio; selectivity of enzyme for palmitate versus stearate; or enzyme enantioselectivity (could alter levels of POS/SOP). One-pot synthesis of cocoa butter equivalents or other cocoa butter alternatives is possible using this aspect of the invention.

[0144] In one aspect, lipases that exhibit regioselectivity and/or chemoselectivity are used in the structure synthesis of lipids or in the processing of lipids. Thus, the methods of the invention use lipases with defined regio-specificity or defined chemoselectivity (e.g., a fatty acid specificity) in a biocatalytic synthetic reaction. For example, the methods of the invention can use lipases with SN1, SN2 and/or SN3 regio-specificity, or combinations thereof. In one aspect, the methods of the invention use lipases that exhibit regioselectivity for the 2-position of a triacylglyceride (TAG). This SN2 regioselectivity can be used in the synthesis of a variety of structured lipids, e.g., triacylglycerides (TAGs), including 1,3-DAGs and components of cocoa butter, as illustrated in FIG. 6.

[0145] The methods and compositions (lipases) of the invention can be used in the biocatalytic synthesis of structured lipids, and the production of nutraceuticals (e.g., polyunsaturated fatty acids and oils), various foods and food additives (e.g., emulsifiers, fat replacers, margarines and spreads), cosmetics (e.g., emulsifiers, creams), pharmaceuticals and drug delivery agents (e.g., liposomes, tablets, formulations), and animal feed additives (e.g., polyunsaturated fatty acids, such as linoleic acids) comprising lipids made by the structured synthesis methods of the invention or processed by the methods of the invention

[0146] In one aspect, lipases of the invention can act on fluorogenic fatty acid (PA) esters, e.g., umbelliferyl PA esters. In one aspect, profiles of PA specificities of lipases made or modified by the methods of the invention can be obtained by measuring their relative activities on a series of umbelliferyl PA esters, such as palmitate, stearate, oleate, laurate, PUFA, butyrate. The following table 1 indicates activity for some exemplary lipases of the invention. The activity was tested on butyrate and oleate.

TABLE 1
Activity for exemplary lipases with umbelliferyl FA esters

| | | | | | Substrate |
|---|---|---|---|---|---|
| | | Specific | | Substrate | Concen- |
| SEQ | Specific | Activity | | Concen- | tration |
| ID NO | Activity | Units | Substrate | tration | Units |
| 69, 70 | 2713.1 | U/mg | Muf-Butyrate | 1 | mM |
| 67, 68 | 51.1 | U/mg | Muf-Oleate | 1 | mM |
| 67, 68 | 5451.2 | U/mg | Muf-Butyrate | 1 | mM |
| 99, 100 | 2441 | U/mg | Muf-Butyrate | 1 | mM |
| 99, 100 | 13 | U/mg | Muf-Oleate | 1 | mM |
| 15, 16 | 1847.7 | U/mg | Muf-Butyrate | 1 | mM |
| 15, 16 | 43.2 | U/mg | Muf-Oleate | 1 | mM |
| 39, 40 | 11560.8 | U/mg | Muf-Butyrate | 1 | mM |
| 39, 40 | 1601.2 | U/mg | Muf-Oleate | 1 | mM |
| 75, 76 | 25842.6 | U/mg | Muf-Butyrate | 1 | mM |
| 75, 76 | 3.7 | U/mg | Muf-Oleate | 1 | mM |
| 33, 34 | 28769.7 | U/mg | Muf-Butyrate | 1 | mM |
| 33, 34 | 4.6 | U/mg | Muf-Oleate | 1 | mM |
| 25, 26 | 8.9 | U/mg | Muf-Oleate | 1 | mM |
| 25, 26 | 49382.7 | U/mg | Muf-Butyrate | 1 | mM |
| 3, 4 | 1193.1 | U/mg | Muf-Butyrate | 1 | mM |
| 3, 4 | 97 | U/mg | Muf-Oleate | 1 | mM |
| 113, 114 | 0.12 | U/mg | Muf-Oleate | 1 | mM |
| 113, 114 | 95.5 | U/mg | Muf-Butyrate | 1 | mM |

[0147] The methods and compositions (lipases) of the invention can be used to synthesize enantiomerically pure chiral products. In one aspect, the methods and compositions (lipases) of the invention can be used to prepare a D-amino acid and corresponding esters from a racemic mix. For example, D-aspartic acid can be prepared from racemic aspartic acid. In one aspect, optically active D-homophenylalanine and/or its esters are prepared. The enantioselectively synthesized D-homophenylalanine can be starting material for many drugs, such as Enalapril, Lisinopril, and Quinapril, used in the treatment of hypertension and congestive heart failure. The D-aspartic acid and its derivatives made by the methods and compositions of the invention can be used in pharmaceuticals, e.g., for the inhibition of arginiosuccinate synthetase to prevent or treat sepsis or cytokine-induced systemic hypotension or as immunosuppressive agents. The D-aspartic acid and its derivatives made by the methods and compositions of the invention can be used as taste modifying compositions for foods, e.g., as sweeteners (e.g., ALITAME™). For example, the methods and compositions (lipases) of the invention can be used to synthesize an optical isomer S(+) of 2-(6-methoxy-2-naphthyl) propionic acid from a racemic (R,S) ester of 2-(6-methoxy-2-naphthyl) propionic acid (see, e.g., U.S. Pat. No. 5,229,280).

[0148] In one aspect, the methods and compositions (lipases) of the invention can be used to for stereoselectively hydrolyzing racemic mixtures of esters of 2-substituted acids, e.g., 2-aryloxy substituted acids, such as R-2-(4-hydroxyphenoxy)propionic acid, 2-arylpropionic acid, ketoprofen to synthesize enantiomerically pure chiral products. See, e.g., U.S. Pat. No. 5,108,916.

[0149] In one aspect, the lipase of the invention for these reactions is immobilized, e.g., as described below. In alternative aspects, the methods of the invention do not require an organic solvent, can proceed with relatively fast reaction rates; and do not require a protective group for the amino acid. See, e.g., U.S. Pat. Nos. 5,552,317; 5,834,259.

[0150] The methods and compositions (lipases) of the invention can be used to hydrolyze oils, such as fish, animal and vegetable oils, and lipids, such as poly-unsaturated fatty acids. In one aspect, the polypeptides of the invention are used process fatty acids (such as poly-unsaturated fatty acids), e.g., fish oil fatty acids, for use in or as a feed additive. Addition of poly-unsaturated fatty acids PUFAs to feed for dairy cattle has been demonstrated to result in improved fertility and milk yields. Fish oil contains a high level of PUFAs (see Table 2, below) and therefore is a potentially inexpensive source for PUFAs as a starting material for the methods of the invention. The biocatalytic methods of the invention can process fish oil under mild conditions, thus avoiding harsh conditions utilized in some processes. Harsh conditions may promote unwanted isomerization, polymerization and oxidation of the PUFAs. In one aspect, the methods of the invention comprise lipase-catalyzed total hydrolysis of fish-oil or selective hydrolysis of PUFAs from fish oil to provide a mild alternative that would leave the high-value PUFAs intact. In one aspect, the methods further comprise hydrolysis of lipids by chemical or physical splitting of the fat.

TABLE 2
Fatty acid composition of a variety of fats and oils

| | Fatty acid content of fats (%): | | | | | | | | | |
|---|---|---|---|---|---|---|---|---|---|---|
| | 14:0 | 16:0 | 16:1 | 18:0 | 18:1 | 18:2 | 18:3 | 18:4 | 20:x | 22:x |
| Tallow | 3.7 | 24.9 | 4.2 | 18.9 | 36 | 3.1 | | | | |
| Lard | | 23.8 | 2.7 | 13.5 | 41.2 | 10.2 | 1.0 | | | |
| Canola Oil | | 4.0 | | 1.8 | 56.1 | 20.3 | 9.3 | | 2.4 | 1.0 |
| Soybean Oil | | 10.3 | | 3.8 | 22.8 | 51 | 6.8 | | 0.2 | |
| Palm Oil | | 48.6 | | 4.1 | 36.6 | 9.1 | 0.3 | | 0.1 | |
| Corn Oil | | 10.9 | | 1.8 | 24.2 | 58 | 0.7 | | | |
| Fish Oil | 7.2 | 16.7 | 11.1 | 3.2 | 10.2 | 1.4 | 2.4 | 3.5 | 16.4 | 16.1 |

[0151] In one aspect, the lipases and methods of the invention are used for the total hydrolysis of fish oil. Lipases can be screened for their ability to catalyze the total hydrolysis of fish oil under different conditions using, e.g., a method comprising a coupled enzyme assay, as illustrated in FIG. 10, to detect the release of glycerol from lipids. This assay has been validated in the presence of lipid emulsions and retains sensitivity under these conditions. In alternative aspects, a single or multiple lipases are used to catalyze the total splitting of the fish oil. Several lipases of the invention may need to be used, owing to the presence of the PUFAs. In one aspect, a PUFA-specific lipase of the invention is combined with a general lipase to achieve the desired effect.

[0152] The methods and compositions (lipases) of the invention can be used to catalyze the partial or total hydrolysis of other oils, e.g. olive oils, that do not contain PUFAs.

[0153] The methods and compositions (lipases) of the invention can be used to catalyze the hydrolysis of PUFA glycerol esters. These methods can be used to make feed additives. In one aspect, lipases of the invention catalyze the release of PUFAs from simple esters and fish oil. Standard assays and analytical methods can be utilized.

[0154] The methods and compositions (lipases) of the invention can be used to selectively hydrolyze saturated esters over unsaturated esters into acids or alcohols. The methods and compositions (lipases) of the invention can be used to treat latexes for a variety of purposes, e.g., to treat latexes used in hair fixative compositions to remove unpleasant odors. The methods and compositions (lipases) of the invention can be used in the treatment of a lipase deficiency in an animal, e.g., a mammal, such as a human.

[0155] The methods and compositions (lipases) of the invention can be used to prepare lubricants, such as hydraulic oils. The methods and compositions (lipases) of the invention can be used in making and using detergents. The methods and compositions (lipases) of the invention can be used in processes for the chemical finishing of fabrics, fibers or yarns. In one aspect, the methods and compositions (lipases) of the invention can be used for obtaining flame retardancy in a fabric using, e.g., a halogen-substituted carboxylic acid or an ester thereof, i.e. a fluorinated, chlorinated or bromated carboxylic acid or an ester thereof. In one aspect, the invention provides methods of generating lipases from environmental libraries.

[0156] Hydrolases of the Invention Having Esterase or Acylase Activity

[0157] In one aspect, the hydrolase activity of the invention comprises an acylase or an esterase activity. In one aspect, the hydrolysis activity comprises hydrolyzing a lactone ring or acylating an acyl lactone or a diol lactone. In one aspect, the hydrolysis activity comprises an esterase activity. In one aspect, the esterase activity comprises hydrolysis of ester groups to organic acids and alcohols. In one aspect, the esterase activity comprises feruloyl esterase activity. In one aspect, the esterase activity comprises a lipase activity. In alternative aspects, the esterase activities of the enzymes of the invention include lipase activity (in the hydrolysis of lipids), acidolysis reactions (to replace an esterified fatty acid with a free fatty acid), transesterification reactions (exchange of fatty acids between triglycerides), ester synthesis and ester interchange reactions. The enzymes of the invention can also be utilized in organic synthesis reactions in the manufacture of medicaments, pesticides or intermediates thereof.

[0158] In one aspect, the polypeptides of the invention have esterase or acylase activity and can be used, e.g., to hydrolyze a lactone ring or acylate an acyl lactone or a diol lactone. In one aspect, the hydrolysis activity of a polypeptide of the invention comprises an esterase activity. In one aspect, the esterase activity comprises hydrolysis of ester groups to organic acids and alcohols. In one aspect, the esterase activity comprises feruloyl esterase activity. In one aspect, the esterase activity comprises a lipase activity. In alternative aspects, the esterase activities of the enzymes of the invention include lipase activity (in the hydrolysis of lipids), acidolysis reactions (to replace an esterified fatty acid with a free fatty acid), transesterification reactions (exchange of fatty acids between triglycerides), ester synthesis and ester interchange reactions. The enzymes of the invention can also be utilized in organic synthesis reactions in the manufacture of medicaments, pesticides or intermediates thereof. The esterase activities of the polypeptides and peptides of the invention include lipase activity (in the hydrolysis of lipids), acidolysis reactions (to replace an esterified fatty acid with a free fatty acid), transesterification reactions (exchange of fatty acids between triglycerides), ester synthesis and ester interchange reactions. The polypeptides and peptides of the invention can also be utilized in organic synthesis reactions in the manufacture of medicaments, pesticides or intermediates thereof.

[0159] Hydrolases of the Invention Having Protease Activity

[0160] In one aspect, the invention provides polypeptides having a protease activity, polynucleotides encoding the polypeptides, and methods for making and using these polynucleotides and polypeptides. In one aspect, the proteases of the invention are used to catalyze the hydrolysis of peptide bonds. The proteases of the invention can be used to 1 make and/or process foods or feeds, textiles, detergents and the like. The proteases of the invention can be used in pharmaceutical compositions and dietary aids.

[0161] The protease preparations of the invention (including those for treating or processing feeds or foods, treating fibers and textiles, waste treatments, plant treatments, and the like) can further comprise one or more enzymes, for example, pectate lyases, cellulases (endo-beta-1,4-glucanases), beta-glucanases (endo-beta-1,3(4)-glucanases), lipases, cutinases, peroxidases, laccases, amylases, glucoamylases, pectinases, reductases, oxidases, phenoloxidases, ligninases, pullulanases, arabinanases, hemicellulases, mannanases, xyloglucanases, xylanases, pectin acetyl esterases, rhamnogalacturonan acetyl esterases, polygalacturonases, rhamnogalacturonases, galactanases, pectin lyases, pectin methylesterases, cellobiohydrolases, transglutaminases; or mixtures thereof.

[0162] A polypeptide can be routinely assayed for protease activity (e.g., tested to see if the protein is within the scope of the invention) by any method, e.g., protease activity can be assayed by the hydrolysis of casein in zymograms, the release of fluorescence from gelatin, or the release of p-nitroanalide from various small peptide substrates (these and other exemplary protease assays are set forth in the Examples, below).

[0163] Hydrolases of the Invention Having Phospholipase Activity

[0164] In one aspect, the invention provides polypeptides having a phospholipase activity. The phospholipases of the invention can have phospholipase A, B, C, D, a lipid acyl hydrolase (LAH), or patatin enzyme activity. The phospholipases of the invention can efficiently cleave glycerolphosphate ester linkage in oils, such as vegetable oils, e.g., oilseed phospholipids, to generate a water extractable phosphorylated base and a diglyceride. In alternative aspects, the phospholipases of the invention can cleave glycerolphosphate ester linkages in phosphatidylcholine, phosphatidylethanolamine, phosphatidylserine and sphingomyelin.

[0165] In one aspect, the phospholipases of the invention are used in various vegetable oil processing steps, such as in vegetable oil extraction, particularly, in the removal of “phospholipid gums” in a process called “oil degumming,” as described herein. The production of vegetable oils from various sources, such as rice bran, soybeans, rapeseed, peanut, sesame, sunflower and corn. The phospholipase enzymes of the invention can be used in place of PLA, e.g., phospholipase A2, in any vegetable oil processing step. A phospholipase of the invention (e.g., phospholipase A, B, C, D, patatin enzymes) can be used for enzymatic degumming of vegetable oils because the phosphate moiety is soluble in water and easy to remove. The diglyceride product will remain in the oil and therefore will reduce losses. The PLCs of the invention can be used in addition to or in place of PLA1s and PLA2s in commercial oil degumming, such as in the ENZYMAX® process, where phospholipids are hydrolyzed by PLA1 and PLA2.

[0166] In alternative aspects, enzymes of the invention have phosphatidylinositol-specific phospholipase C (PI-PLC) activity, phosphatidylcholine-specific phospholipase C activity, phosphatidic acid phosphatase activity, phospholipase A activity and/or patatin-related phospholipase activity. These enzymes can be used alone or in combination each other or with other enzymes of the invention, or other enzymes. In one aspect, the invention provides methods wherein these enzymes (including phosphatidylinositol-specific phospholipase C, phosphatidylcholine-specific phospholipase C, phosphatidic acid phosphatase, phospholipase A and/or patatin-related phospholipases of the invention) are used alone or in combination in the degumming of oils, e.g., rice bran oil, vegetable oils, e.g., high phosphorous oils, such as soybean, corn, canola and sunflower oils.

[0167] These enzymes and processes of the invention can be used to achieve a more complete degumming of high phosphorous oils, in particular, rice bran, soybean, corn, canola, and sunflower oils. Upon cleavage by PI-PLC, phosphatidylinositol is converted to diacylglycerol and phosphoinositol. The diacylglycerol partitions to the aqueous phase (improving oil yield) and the phosphoinositol partitions to the aqueous phase where it is removed as a component of the heavy phase during centrifugation. An enzyme of the invention, e.g., a PI-PLC of the invention, can be incorporated into either a chemical or physical oil refining process.

[0168] In one aspect, hydrolases, e.g., PLC phospholipases, of the invention utilize a variety of phospholipid substrates including phosphatidylcholine, phosphatidylethanolamine, phosphatidylserine, phosphatidylinositol, and phosphatidic acid. In addition, these enzymes can have varying degrees of activity on the lysophospholipid forms of these phospholipids. In various aspects, PLC enzymes of the invention may show a preference for phosphatidylcholine and phosphatidylethanolamine as substrates.

[0169] In one aspect, hydrolases, e.g., phosphatidylinositol PLC phospholipases, of the invention utilize a variety of phospholipid substrates including phosphatidylcholine, phosphatidylethanolamine, phosphatidylserine, phosphatidylinositol, and phosphatidic acid. In addition, these enzymes can have varying degrees of activity on the lysophospholipid forms of these phospholipids. In various aspects, phosphatidylinositol PLC enzymes of the invention may show a preference for phosphatidylinositol as a substrate.

[0170] In one aspect, hydrolases, e.g., patatin enzymes, of the invention utilize a variety of phospholipid substrates including phosphatidylcholine, phosphatidylethanolamine, phosphatidylserine, phosphatidylinositol, and phosphatidic acid. In addition, these enzymes can have varying degrees of activity on the lysophospholipid forms of these phospholipids. In various aspects, patatins of the invention are based on a conservation of amino acid sequence similarity. In various aspects, these enzymes display a diverse set of biochemical properties and may perform reactions characteristic of PLA1, PLA2, PLC, or PLD enzyme classes.

[0171] In one aspect, hydrolases, e.g., PLD phospholipases, of the invention utilize a variety of phospholipid substrates including phosphatidylcholine, phosphatidylethanolamine, phosphatidylserine, phosphatidylinositol, and phosphatidic acid. In addition, these enzymes can have varying degrees of activity on the lysophospholipid forms of these phospholipids. In one aspect, these enzymes are useful for carrying out transesterification reactions to produce structured phospholipids.

### Generating and Manipulating Nucleic Acids

[0172] The invention provides nucleic acids, including expression cassettes such as expression vectors, encoding the polypeptides (e.g., hydrolases, antibodies) of the invention. The invention also includes methods for discovering new hydrolase sequences using the nucleic acids of the invention. Also provided are methods for modifying the nucleic acids of the invention by, e.g., synthetic ligation reassembly, optimized directed evolution system and/or saturation mutagenesis.

[0173] The phrases “nucleic acid” or “nucleic acid sequence” can include an oligonucleotide, nucleotide, polynucleotide, or to a fragment of any of these, to DNA or RNA (e.g., mRNA, rRNA, tRNA, RNAi) of genomic or synthetic origin which may be single-stranded or double-stranded and may represent a sense or antisense strand, to peptide nucleic acid (PNA), or to any DNA-like or RNA-like material, natural or synthetic in origin, including, e.g., RNAi (double-stranded “interfering” RNA, including miRNA and siRNA), ribonucleoproteins (e.g., iRNPs). The term encompasses nucleic acids, i.e., oligonucleotides, containing (comprising) known analogues of natural nucleotides. The term also encompasses nucleic-acid-like structures with synthetic backbones, see e.g., Mata (1997) Toxicol. Appl. Pharmacol. 144:189-197; Strauss-Soukup (1997) Biochemistry 36:8692-8698; Samstag (1996) Antisense Nucleic Acid Drug Dev 6:153-156.

[0174] The term “gene” can include a nucleic acid sequence comprising a segment of DNA involved in producing a transcription product (e.g., a message), which in turn is translated to produce a polypeptide chain, or regulates gene transcription, reproduction or stability. Genes can include, inter alia, regions preceding and following the coding region, such as leader and trailer, promoters and enhancers, as well as, where applicable, intervening sequences (introns) between individual coding segments (exons).

[0175] A “coding sequence of” or a “sequence encodes” a particular polypeptide or protein, is a nucleic acid sequence which is transcribed and translated into a polypeptide or protein when placed under the control of appropriate regulatory sequences. A promoter sequence can be “operably linked to” a coding sequence when RNA polymerase which initiates transcription at the promoter will transcribe the coding sequence into mRNA, as discussed further, below. “Oligonucleotide” can include either a single stranded polydeoxynucleotide or two complementary polydeoxynucleotide strands which may be chemically synthesized. Such synthetic oligonucleotides have no 5′ phosphate and thus will not ligate to another oligonucleotide without adding a phosphate with an ATP in the presence of a kinase. A synthetic oligonucleotide will ligate to a fragment that has not been dephosphorylated.

[0176] The term “recombinant” can mean that the nucleic acid is adjacent to a “backbone” nucleic acid to which it is not adjacent in its natural environment. In one aspect, nucleic acids represent 5% or more of the number of nucleic acid inserts in a population of nucleic acid “backbone molecules.” “Backbone molecules” according to the invention include nucleic acids such as expression vectors, self-replicating nucleic acids, viruses, integrating nucleic acids, and other vectors or nucleic acids used to maintain or manipulate a nucleic acid insert of interest. In one aspect, the enriched nucleic acids represent 15%, 20%, 30%, 40%, 50%, 60%, 70%, 80%, 90% or more of the number of nucleic acid inserts in the population of recombinant backbone molecules. “Recombinant” polypeptides or proteins refer to polypeptides or proteins produced by recombinant DNA techniques; e.g., produced from cells transformed by an exogenous DNA construct encoding the desired polypeptide or protein. “Synthetic” polypeptides or protein are those prepared by chemical synthesis, as described in further detail, below.

[0177] The nucleic acids of the invention can be made, isolated and/or manipulated by, e.g., cloning and expression of cDNA libraries, amplification of message or genomic DNA by PCR, and the like. In practicing the methods of the invention, homologous genes can be modified by manipulating a template nucleic acid, as described herein. The invention can be practiced in conjunction with any method or protocol or device known in the art, which are well described in the scientific and patent literature.

[0178] General Techniques

[0179] The nucleic acids used to practice this invention, whether RNA, iRNA, antisense nucleic acid, cDNA, genomic DNA, vectors, viruses or hybrids thereof, may be isolated from a variety of sources, genetically engineered, amplified, and/or expressed/generated recombinantly. Recombinant polypeptides generated from these nucleic acids can be individually isolated or cloned and tested for a desired activity. Any recombinant expression system can be used, including bacterial, mammalian, yeast, insect or plant cell expression systems.

[0180] Alternatively, these nucleic acids can be synthesized in vitro by well-known chemical synthesis techniques, as described in, e.g., Adams (1983) J. Am. Chem. Soc. 105:661; Belousov (1997) Nucleic Acids Res. 25:3440-3444; Frenkel (1995) Free Radic. Biol. Med. 19:373-380; Blommers (1994) Biochemistry 33:7886-7896; Narang (1979) Meth. Enzymol. 68:90; Brown (1979) Meth. Enzymol. 68:109; Beaucage (1981) Tetra. Lett. 22:1859; U.S. Pat. No. 4,458,066.

[0181] Techniques for the manipulation of nucleic acids, such as, e.g., subcloning, labeling probes (e.g., random-primer labeling using Klenow polymerase, nick translation, amplification), sequencing, hybridization and the like are well described in the scientific and patent literature, see, e.g., Sambrook, ed., MOLECULAR CLONING: A LABORATORY MANUAL (2ND ED.), Vols. 1-3, Cold Spring Harbor Laboratory, (1989); CURRENT PROTOCOLS IN MOLECULAR BIOLOGY, Ausubel, ed. John Wiley & Sons, Inc., New York (1997); LABORATORY TECHNIQUES IN BIOCHEMISTRY AND MOLECULAR BIOLOGY: HYBRIDIZATION WITH NUCLEIC ACID PROBES, Part I. Theory and Nucleic Acid Preparation, Tijssen, ed. Elsevier, N.Y. (1993).

[0182] Another useful means of obtaining and manipulating nucleic acids used to practice the methods of the invention is to clone from genomic samples, and, if desired, screen and re-clone inserts isolated or amplified from, e.g., genomic clones or cDNA clones. Sources of nucleic acid used in the methods of the invention include genomic or cDNA libraries contained in, e.g., mammalian artificial chromosomes (MACs), see, e.g., U.S. Pat. Nos. 5,721,118; 6,025,155; human artificial chromosomes, see, e.g., Rosenfeld (1997) Nat. Genet. 15:333-335; yeast artificial chromosomes (YAC); bacterial artificial chromosomes (BAC); Pl artificial chromosomes, see, e.g., Woon (1998) Genomics 50:306-316; Pl-derived vectors (PACs), see, e.g., Kern (1997) Biotechniques 23:120-124; cosmids, recombinant viruses, phages or plasmids.

[0183] In one aspect, a nucleic acid encoding a polypeptide of the invention is assembled in appropriate phase with a leader sequence capable of directing secretion of the translated polypeptide or fragment thereof.

[0184] The invention provides fusion proteins and nucleic acids encoding them. A polypeptide of the invention can be fused to a heterologous peptide or polypeptide, such as N-terminal identification peptides which impart desired characteristics, such as increased stability or simplified purification. Peptides and polypeptides of the invention can also be synthesized and expressed as fusion proteins with one or more additional domains linked thereto for, e.g., producing a more immunogenic peptide, to more readily isolate a recombinantly synthesized peptide, to identify and isolate antibodies and antibody-expressing B cells, and the like. Detection and purification facilitating domains include, e.g., metal chelating peptides such as polyhistidine tracts and histidine-tryptophan modules that allow purification on immobilized metals, protein A domains that allow purification on immobilized immunoglobulin, and the domain utilized in the FLAGS extension/affinity purification system (Immunex Corp, Seattle Wash.). The inclusion of a cleavable linker sequences such as Factor Xa or enterokinase (Invitrogen, San Diego Calif.) between a purification domain and the motif-comprising peptide or polypeptide to facilitate purification. For example, an expression vector can include an epitope-encoding nucleic acid sequence linked to six histidine residues followed by a thioredoxin and an enterokinase cleavage site (see e.g., Williams (1995) Biochemistry 34:1787-1797; Dobeli (1998) Protein Expr. Purif. 12:404-414). The histidine residues facilitate detection and purification while the enterokinase cleavage site provides a means for purifying the epitope from the remainder of the fusion protein. Technology pertaining to vectors encoding fusion proteins and application of fusion proteins are well described in the scientific and patent literature, see e.g., Kroll (1993) DNA Cell. Biol., 12:441-53.

[0185] Transcriptional and Translational Control Sequences

[0186] The invention provides nucleic acid (e.g., DNA, iRNA) sequences of the invention operatively linked to expression (e.g., transcriptional or translational) control sequence(s), e.g., promoters or enhancers, to direct or modulate RNA synthesis/expression. The expression control sequence can be in an expression vector. Exemplary bacterial promoters include lac, lacZ, T3, T7, gpt, lambda PR, PL and trp. Exemplary eukaryotic promoters include CMV immediate early, HSV thymidine kinase, early and late SV40, LTRs from retrovirus, and mouse metallothionein I.

[0187] Promoters suitable for expressing a polypeptide in bacteria include the E. coli lac or trp promoters, the lacI promoter, the lacZ promoter, the T3 promoter, the T7 promoter, the gpt promoter, the lambda PR promoter, the lambda PL promoter, promoters from operons encoding glycolytic enzymes such as 3-phosphoglycerate kinase (PGK), and the acid phosphatase promoter. Eukaryotic promoters include the CMV immediate early promoter, the HSV thymidine kinase promoter, heat shock promoters, the early and late SV40 promoter, LTRs from retroviruses, and the mouse metallothionein-I promoter. Other promoters known to control expression of genes in prokaryotic or eukaryotic cells or their viruses may also be used.

[0188] The term “expression cassette” as used herein refers to a nucleotide sequence which is capable of affecting expression of a structural gene (i.e., a protein coding sequence, such as a hydrolase of the invention) in a host compatible with such sequences. Expression cassettes include at least a promoter operably linked with the polypeptide coding sequence; and, optionally, with other sequences, e.g., transcription termination signals. Additional factors necessary or helpful in effecting expression may also be used, e.g., enhancers. “Operably linked” as used herein refers to linkage of a promoter upstream from a DNA sequence such that the promoter mediates transcription of the DNA sequence. Thus, expression cassettes also include plasmids, expression vectors, recombinant viruses, any form of recombinant “naked DNA” vector, and the like. A “vector” comprises a nucleic acid which can infect, transfect, transiently or permanently transduce a cell. It will be recognized that a vector can be a naked nucleic acid, or a nucleic acid complexed with protein or lipid. The vector optionally comprises viral or bacterial nucleic acids and/or proteins, and/or membranes (e.g., a cell membrane, a viral lipid envelope, etc.). Vectors include, but are not limited to replicons (e.g., RNA replicons, bacteriophages) to which fragments of DNA may be attached and become replicated. Vectors thus include, but are not limited to RNA, autonomous self-replicating circular or linear DNA or RNA (e.g., plasmids, viruses, and the like, see, e.g., U.S. Pat. No. 5,217,879), and includes both the expression and non-expression plasmids. Where a recombinant microorganism or cell culture is described as hosting an “expression vector” this includes both extra-chromosomal circular and linear DNA and DNA that has been incorporated into the host chromosome(s). Where a vector is being maintained by a host cell, the vector may either be stably replicated by the cells during mitosis as an autonomous structure, or is incorporated within the host's genome.

[0189] As used herein, the term “promoter” includes all sequences capable of driving transcription of a coding sequence in a cell, e.g., a plant cell. Thus, promoters used in the constructs of the invention include cis-acting transcriptional control elements and regulatory sequences that are involved in regulating or modulating the timing and/or rate of transcription of a gene. For example, a promoter can be a cis-acting transcriptional control element, including an enhancer, a promoter, a transcription terminator, an origin of replication, a chromosomal integration sequence, 5′ and 3′ untranslated regions, or an intronic sequence, which are involved in transcriptional regulation. These cis-acting sequences typically interact with proteins or other biomolecules to carry out (turn on/off, regulate, modulate, etc.) transcription. “Constitutive” promoters are those that drive expression continuously under most environmental conditions and states of development or cell differentiation. “Inducible” or “regulatable” promoters direct expression of the nucleic acid of the invention under the influence of environmental conditions or developmental conditions. Examples of environmental conditions that may affect transcription by inducible promoters include anaerobic conditions, elevated temperature, drought, or the presence of light.

[0190] “Tissue-specific” promoters are transcriptional control elements that are only active in particular cells or tissues or organs, e.g., in plants or animals. Tissue-specific regulation may be achieved by certain intrinsic factors which ensure that genes encoding proteins specific to a given tissue are expressed. Such factors are known to exist in mammals and plants so as to allow for specific tissues to develop.

[0191] Tissue-Specific Plant Promoters

[0192] The invention provides expression cassettes that can be expressed in a tissue-specific manner, e.g., that can express a hydrolase of the invention in a tissue-specific manner. The invention also provides plants or seeds that express a hydrolase of the invention in a tissue-specific manner. The tissue-specificity can be seed specific, stem specific, leaf specific, root specific, fruit specific and the like.

[0193] The term “plant” includes whole plants, plant parts (e.g., leaves, stems, flowers, roots, etc.), plant protoplasts, seeds and plant cells and progeny of same. The class of plants which can be used in the method of the invention is generally as broad as the class of higher plants amenable to transformation techniques, including angiosperms (monocotyledonous and dicotyledonous plants), as well as gymnosperms. It includes plants of a variety of ploidy levels, including polyploid, diploid, haploid and hemizygous states. As used herein, the term “transgenic plant” includes plants or plant cells into which a heterologous nucleic acid sequence has been inserted, e.g., the nucleic acids and various recombinant constructs (e.g., expression cassettes) of the invention.

[0194] In one aspect, a constitutive promoter such as the CaMV 35S promoter can be used for expression in specific parts of the plant or seed or throughout the plant. For example, for overexpression of a hydrolase of the invention, a plant promoter fragment can be employed which will direct expression of a nucleic acid in some or all tissues of a plant, e.g., a regenerated plant. Such “constitutive” promoters and are active under most environmental conditions and states of development or cell differentiation. Examples of constitutive promoters include the cauliflower mosaic virus (CaMV) 35S transcription initiation region, the 1′- or 2′-promoter derived from T-DNA of Agrobacterium tumefaciens, and other transcription initiation regions from various plant genes known to those of skill. Such genes include, e.g., ACT11 from Arabidopsis (Huang (1996) Plant Mol. Biol. 33:125-139); Cat3 from Arabidopsis (GenBank No. U43147, Zhong (1996) Mol. Gen. Genet. 251:196-203); the gene encoding stearoyl-acyl carrier protein desaturase from Brassica napus (Genbank No. X74782, Solocombe (1994) Plant Physiol. 104:1167-1176); GPc1 from maize (GenBank No. X15596; Martinez (1989) J. Mol. Biol. 208:551-565); the Gpc2 from maize (GenBank No. U45855, Manjunath (1997) Plant Mol. Biol. 33:97-112); plant promoters described in U.S. Pat. Nos. 4,962,028; 5,633,440.

[0195] The invention uses tissue-specific or constitutive promoters derived from viruses which can include, e.g., the tobamovirus subgenomic promoter (Kumagai (1995) Proc. Natl. Acad. Sci. USA 92:1679-1683; the rice tungro bacilliform virus (RTBV), which replicates only in phloem cells in infected rice plants, with its promoter which drives strong phloem-specific reporter gene expression; the cassaya vein mosaic virus (CVMV) promoter, with highest activity in vascular elements, in leaf mesophyll cells, and in root tips (Verdaguer (1996) Plant Mol. Biol. 31:1129-1139).

[0196] Alternatively, the plant promoter may direct expression of a hydrolase-expressing nucleic acid in a specific tissue, organ or cell type (i.e. tissue-specific promoters) or may be otherwise under more precise environmental or developmental control or under the control of an inducible promoter. Examples of environmental conditions that may affect transcription include anaerobic conditions, elevated temperature, the presence of light, or sprayed with chemicals/hormones. For example, the invention incorporates the drought-inducible promoter of maize (Busk (1997) supra); the cold, drought, and high salt inducible promoter from potato (Kirch (1997) Plant Mol. Biol. 33:897 909).

[0197] Tissue-specific promoters can promote transcription only within a certain time frame of developmental stage within that tissue. See, e.g., Blazquez (1998) Plant Cell 10:791-800, characterizing the Arabidopsis LEAFY gene promoter. See also Cardon (1997) Plant J 12:367-77, describing the transcription factor SPL3, which recognizes a conserved sequence motif in the promoter region of the A. thaliana floral meristem identity gene API; and Mandel (1995) Plant Molecular Biology, Vol. 29, pp 995-1004, describing the meristem promoter eIF4. Tissue specific promoters which are active throughout the life cycle of a particular tissue can be used. In one aspect, the nucleic acids of the invention are operably linked to a promoter active primarily only in cotton fiber cells. In one aspect, the nucleic acids of the invention are operably linked to a promoter active primarily during the stages of cotton fiber cell elongation, e.g., as described by Rinehart (1996) supra. The nucleic acids can be operably linked to the Fbl2A gene promoter to be preferentially expressed in cotton fiber cells (Ibid). See also, John (1997) Proc. Natl. Acad. Sci. USA 89:5769-5773; John, et al., U.S. Pat. Nos. 5,608,148 and 5,602,321, describing cotton fiber-specific promoters and methods for the construction of transgenic cotton plants. Root-specific promoters may also be used to express the nucleic acids of the invention. Examples of root-specific promoters include the promoter from the alcohol dehydrogenase gene (DeLisle (1990) Int. Rev. Cytol. 123:39-60). Other promoters that can be used to express the nucleic acids of the invention include, e.g., ovule-specific, embryo-specific, endosperm-specific, integument-specific, seed coat-specific promoters, or some combination thereof; a leaf-specific promoter (see, e.g., Busk (1997) Plant J. 11:1285 1295, describing a leaf-specific promoter in maize); the ORF13 promoter from Agrobacterium rhizogenes (which exhibits high activity in roots, see, e.g., Hansen (1997) supra); a maize pollen specific promoter (see, e.g., Guerrero (1990) Mol. Gen. Genet. 224:161 168); a tomato promoter active during fruit ripening, senescence and abscission of leaves and, to a lesser extent, of flowers can be used (see, e.g., Blume (1997) Plant J. 12:731 746); a pistil-specific promoter from the potato SK2 gene (see, e.g., Ficker (1997) Plant Mol. Biol. 35:425 431); the Blec4 gene from pea, which is active in epidermal tissue of vegetative and floral shoot apices of transgenic alfalfa making it a useful tool to target the expression of foreign genes to the epidermal layer of actively growing shoots or fibers; the ovule-specific BEL1 gene (see, e.g., Reiser (1995) Cell 83:735-742, GenBank No. U39944); and/or, the promoter in Klee, U.S. Pat. No. 5,589,583, describing a plant promoter region is capable of conferring high levels of transcription in meristematic tissue and/or rapidly dividing cells.

[0198] Alternatively, plant promoters which are inducible upon exposure to plant hormones, such as auxins, are used to express the nucleic acids of the invention. For example, the invention can use the auxin-response elements E1 promoter fragment (AuxREs) in the soybean (Glycine max L.) (Liu (1997) Plant Physiol. 115:397-407); the auxin-responsive Arabidopsis GST6 promoter (also responsive to salicylic acid and hydrogen peroxide) (Chen (1996) Plant J. 10: 955-966); the auxin-inducible parC promoter from tobacco (Sakai (1996) 37:906-913); a plant biotin response element (Streit (1997) Mol. Plant. Microbe Interact. 10:933-937); and, the promoter responsive to the stress hormone abscisic acid (Sheen (1996) Science 274:1900-1902).

[0199] The nucleic acids of the invention can also be operably linked to plant promoters which are inducible upon exposure to chemicals reagents which can be applied to the plant, such as herbicides or antibiotics. For example, the maize In2-2 promoter, activated by benzenesulfonamide herbicide safeners, can be used (De Veylder (1997) Plant Cell Physiol. 38:568-577); application of different herbicide safeners induces distinct gene expression patterns, including expression in the root, hydathodes, and the shoot apical meristem. Coding sequence can be under the control of, e.g., a tetracycline-inducible promoter, e.g., as described with transgenic tobacco plants containing the Avena sativa L. (oat) arginine decarboxylase gene (Masgrau (1997) Plant J. 11:465-473); or, a salicylic acid-responsive element (Stange (1997) Plant J. 11: 1315-1324). Using chemically—(e.g., hormone- or pesticide-) induced promoters, i.e., promoter responsive to a chemical which can be applied to the transgenic plant in the field, expression of a polypeptide of the invention can be induced at a particular stage of development of the plant. Thus, the invention also provides for transgenic plants containing an inducible gene encoding for polypeptides of the invention whose host range is limited to target plant species, such as corn, rice, barley, wheat, potato or other crops, inducible at any stage of development of the crop.

[0200] Tissue-specific plant promoters may drive expression of operably linked sequences in tissues other than the target tissue. Thus, a tissue-specific promoter is one that drives expression preferentially in the target tissue or cell type, but may also lead to some expression in other tissues as well.

[0201] The nucleic acids of the invention can also be operably linked to plant promoters which are inducible upon exposure to chemicals reagents. These reagents include, e.g., herbicides, synthetic auxins, or antibiotics which can be applied, e.g., sprayed, onto transgenic plants. Inducible expression of the hydrolase-producing nucleic acids of the invention will allow the grower to select plants with the optimal starch/sugar ratio. The development of plant parts can thus controlled. In this way the invention provides the means to facilitate the harvesting of plants and plant parts. For example, in various embodiments, the maize In2-2 promoter, activated by benzenesulfonamide herbicide safeners, is used (De Veylder (1997) Plant Cell Physiol. 38:568-577); application of different herbicide safeners induces distinct gene expression patterns, including expression in the root, hydathodes, and the shoot apical meristem. Coding sequences of the invention are also under the control of a tetracycline-inducible promoter, e.g., as described with transgenic tobacco plants containing the Avena sativa L. (oat) arginine decarboxylase gene (Masgrau (1997) Plant J. 11:465-473); or, a salicylic acid-responsive element (Stange (1997) Plant J. 11: 1315-1324).

[0202] If proper polypeptide expression is desired, a polyadenylation region at the 3′-end of the coding region should be included. The polyadenylation region can be derived from the natural gene, from a variety of other plant genes, or from genes in the Agrobacterial T-DNA.

[0203] Expression Vectors and Cloning Vehicles

[0204] The invention provides expression vectors and cloning vehicles comprising nucleic acids of the invention, e.g., sequences encoding the hydrolases and antibodies of the invention. Expression vectors and cloning vehicles of the invention can comprise viral particles, baculovirus, phage, plasmids, phagemids, cosmids, fosmids, bacterial artificial chromosomes, viral DNA (e.g., vaccinia, adenovirus, foul pox virus, pseudorabies and derivatives of SV40), P1-based artificial chromosomes, yeast plasmids, yeast artificial chromosomes, and any other vectors specific for specific hosts of interest (such as bacillus, Aspergillus and yeast). Vectors of the invention can include chromosomal, non-chromosomal and synthetic DNA sequences. Large numbers of suitable vectors are known to those of skill in the art, and are commercially available. Exemplary vectors are include: bacterial: pQE vectors (Qiagen), pBluescript plasmids, pNH vectors, (lambda-ZAP vectors (Stratagene); ptrc99a, pKK223-3, pDR540, pRIT2T (Pharmacia); Eukaryotic: pXT1, pSG5 (Stratagene), pSVK3, pBPV, pMSG, pSVLSV40 (Pharmacia). However, any other plasmid or other vector may be used so long as they are replicable and viable in the host. Low copy number or high copy number vectors may be employed with the present invention.

[0205] The expression vector may comprise a promoter, a ribosome binding site for translation initiation and a transcription terminator. The vector may also include appropriate sequences for amplifying expression. Mammalian expression vectors can comprise an origin of replication, any necessary ribosome binding sites, a polyadenylation site, splice donor and acceptor sites, transcriptional termination sequences, and 5′ flanking non-transcribed sequences. In some aspects, DNA sequences derived from the SV40 splice and polyadenylation sites may be used to provide the required non-transcribed genetic elements.

[0206] In one aspect, the expression vectors contain one or more selectable marker genes to permit selection of host cells containing the vector. Such selectable markers include genes encoding dihydrofolate reductase or genes conferring neomycin resistance for eukaryotic cell culture, genes conferring tetracycline or ampicillin resistance in E. coli, and the S. cerevisiae TRP1 gene. Promoter regions can be selected from any desired gene using chloramphenicol transferase (CAT) vectors or other vectors with selectable markers.

[0207] Vectors for expressing the polypeptide or fragment thereof in eukaryotic cells may also contain enhancers to increase expression levels. Enhancers are cis-acting elements of DNA, usually from about 10 to about 300 bp in length that act on a promoter to increase its transcription. Examples include the SV40 enhancer on the late side of the replication origin bp 100 to 270, the cytomegalovirus early promoter enhancer, the polyoma enhancer on the late side of the replication origin, and the adenovirus enhancers.

[0208] A DNA sequence may be inserted into a vector by a variety of procedures. In general, the DNA sequence is ligated to the desired position in the vector following digestion of the insert and the vector with appropriate restriction endonucleases. Alternatively, blunt ends in both the insert and the vector may be ligated. A variety of cloning techniques are known in the art, e.g., as described in Ausubel and Sambrook. Such procedures and others are deemed to be within the scope of those skilled in the art.

[0209] The vector may be in the form of a plasmid, a viral particle, or a phage. Other vectors include chromosomal, non-chromosomal and synthetic DNA sequences, derivatives of SV40; bacterial plasmids, phage DNA, baculovirus, yeast plasmids, vectors derived from combinations of plasmids and phage DNA, viral DNA such as vaccinia, adenovirus, fowl pox virus, and pseudorabies. A variety of cloning and expression vectors for use with prokaryotic and eukaryotic hosts are described by, e.g., Sambrook.

[0210] Particular bacterial vectors which may be used include the commercially available plasmids comprising genetic elements of the well known cloning vector pBR322 (ATCC 37017), pKK223-3 (Pharmacia Fine Chemicals, Uppsala, Sweden), GEM1 (Promega Biotec, Madison, Wis., USA) pQE70, pQE60, pQE-9 (Qiagen), pD10, psiX174 pBluescript II KS, pNH8A, pNH16a, pNH18A, pNH46A (Stratagene), ptrc99a, pKK223-3, pKK233-3, DR540, pRIT5 (Pharmacia), pKK232-8 and pCM7. Particular eukaryotic vectors include pSV2CAT, pOG44, pXT1, pSG (Stratagene) pSVK3, pBPV, pMSG, and pSVL (Pharmacia). However, any other vector may be used as long as it is replicable and viable in the host cell.

[0211] The nucleic acids of the invention can be expressed in expression cassettes, vectors or viruses and transiently or stably expressed in plant cells and seeds. One exemplary transient expression system uses episomal expression systems, e.g., cauliflower mosaic virus (CaMV) viral RNA generated in the nucleus by transcription of an episomal mini-chromosome containing supercoiled DNA, see, e.g., Covey (1990) Proc. Natl. Acad. Sci. USA 87:1633-1637. Alternatively, coding sequences, i.e., all or sub-fragments of sequences of the invention can be inserted into a plant host cell genome becoming an integral part of the host chromosomal DNA. Sense or antisense transcripts can be expressed in this manner. A vector comprising the sequences (e.g., promoters or coding regions) from nucleic acids of the invention can comprise a marker gene that confers a selectable phenotype on a plant cell or a seed. For example, the marker may encode biocide resistance, particularly antibiotic resistance, such as resistance to kanamycin, G418, bleomycin, hygromycin, or herbicide resistance, such as resistance to chlorosulfuron or Basta.

[0212] Expression vectors capable of expressing nucleic acids and proteins in plants are well known in the art, and can include, e.g., vectors from Agrobacterium spp., potato virus X (see, e.g., Angell (1997) EMBO J. 16:3675-3684), tobacco mosaic virus (see, e.g., Casper (1996) Gene 173:69-73), tomato bushy stunt virus (see, e.g., Hillman (1989) Virology 169:42-50), tobacco etch virus (see, e.g., Dolja (1997) Virology 234:243-252), bean golden mosaic virus (see, e.g., Morinaga (1993) Microbiol Immunol. 37:471-476), cauliflower mosaic virus (see, e.g., Cecchini (1997) Mol. Plant. Microbe Interact. 10: 1094-1101), maize Ac/Ds transposable element (see, e.g., Rubin (1997) Mol. Cell. Biol. 17:6294-6302; Kunze (1996) Curr. Top. Microbiol. Immunol. 204:161-194), and the maize suppressor-mutator (Spm) transposable element (see, e.g., Schlappi (1996) Plant Mol. Biol. 32:717-725); and derivatives thereof.

[0213] In one aspect, the expression vector can have two replication systems to allow it to be maintained in two organisms, for example in mammalian or insect cells for expression and in a prokaryotic host for cloning and amplification. Furthermore, for integrating expression vectors, the expression vector can contain at least one sequence homologous to the host cell genome. It can contain two homologous sequences which flank the expression construct. The integrating vector can be directed to a specific locus in the host cell by selecting the appropriate homologous sequence for inclusion in the vector. Constructs for integrating vectors are well known in the art.

[0214] Expression vectors of the invention may also include a selectable marker gene to allow for the selection of bacterial strains that have been transformed, e.g., genes which render the bacteria resistant to drugs such as ampicillin, chloramphenicol, erythromycin, kanamycin, neomycin and tetracycline. Selectable markers can also include biosynthetic genes, such as those in the histidine, tryptophan and leucine biosynthetic pathways.

[0215] Host Cells and Transformed Cells

[0216] The invention also provides a transformed cell comprising a nucleic acid sequence of the invention, e.g., a sequence encoding a hydrolase or an antibody of the invention, or a vector of the invention. The host cell may be any of the host cells familiar to those skilled in the art, including prokaryotic cells, eukaryotic cells, such as bacterial cells, fungal cells, yeast cells, mammalian cells, insect cells, or plant cells. Enzymes of the invention can be expressed in any host cell, e.g., any bacterial cell, any yeast cell, e.g., Pichia pastoris, Saccharomyces cerevisiae or Schizosaccharomyces pombe. Exemplary bacterial cells include E. coli, Lactococcus lactis, Streptomyces, Bacillus subtilis, Bacillus cereus, Salmonella typhimurium or any species within the genera Bacillus, Streptomyces and Staphylococcus. Exemplary insect cells include Drosophila S2 and Spodoptera Sf9. Exemplary animal cells include CHO, COS or Bowes melanoma or any mouse or human cell line. The selection of an appropriate host is within the abilities of those skilled in the art. Techniques for transforming a wide variety of higher plant species are well known and described in the technical and scientific literature. See, e.g., Weising (1988) Ann. Rev. Genet. 22:421-477, U.S. Pat. No. 5,750,870.

[0217] The vector may be introduced into the host cells using any of a variety of techniques, including transformation, transfection, transduction, viral infection, gene guns, or Ti-mediated gene transfer. Particular methods include calcium phosphate transfection, DEAE-Dextran mediated transfection, lipofection, or electroporation (Davis, L., Dibner, M., Battey, I., Basic Methods in Molecular Biology, (1986)).

[0218] Where appropriate, the engineered host cells can be cultured in conventional nutrient media modified as appropriate for activating promoters, selecting transformants or amplifying the genes of the invention. Following transformation of a suitable host strain and growth of the host strain to an appropriate cell density, the selected promoter may be induced by appropriate means (e.g., temperature shift or chemical induction) and the cells may be cultured for an additional period to allow them to produce the desired polypeptide or fragment thereof.

[0219] In one aspect, the nucleic acids or vectors of the invention are introduced into the cells for screening, thus, the nucleic acids enter the cells in a manner suitable for subsequent expression of the nucleic acid. The method of introduction is largely dictated by the targeted cell type. Exemplary methods include CaPO₄ precipitation, liposome fusion, lipofection (e.g., LIPOFECTIN™), electroporation, viral infection, etc. The candidate nucleic acids may stably integrate into the genome of the host cell (for example, with retroviral introduction) or may exist either transiently or stably in the cytoplasm (i.e. through the use of traditional plasmids, utilizing standard regulatory sequences, selection markers, etc.). As many pharmaceutically important screens require human or model mammalian cell targets, retroviral vectors capable of transfecting such targets are preferred.

[0220] Cells can be harvested by centrifugation, disrupted by physical or chemical means, and the resulting crude extract is retained for further purification. Microbial cells employed for expression of proteins can be disrupted by any convenient method, including freeze-thaw cycling, sonication, mechanical disruption, or use of cell lysing agents. Such methods are well known to those skilled in the art. The expressed polypeptide or fragment thereof can be recovered and purified from recombinant cell cultures by methods including ammonium sulfate or ethanol precipitation, acid extraction, anion or cation exchange chromatography, phosphocellulose chromatography, hydrophobic interaction chromatography, affinity chromatography, hydroxylapatite chromatography and lectin chromatography. Protein refolding steps can be used, as necessary, in completing configuration of the polypeptide. If desired, high performance liquid chromatography (HPLC) can be employed for final purification steps.

[0221] Various mammalian cell culture systems can also be employed to express recombinant protein. Examples of mammalian expression systems include the COS-7 lines of monkey kidney fibroblasts and other cell lines capable of expressing proteins from a compatible vector, such as the C127, 3T3, CHO, HeLa and BHK cell lines.

[0222] The constructs in host cells can be used in a conventional manner to produce the gene product encoded by the recombinant sequence. Depending upon the host employed in a recombinant production procedure, the polypeptides produced by host cells containing the vector may be glycosylated or may be non-glycosylated. Polypeptides of the invention may or may not also include an initial methionine amino acid residue.

[0223] Cell-free translation systems can also be employed to produce a polypeptide of the invention. Cell-free translation systems can use mRNAs transcribed from a DNA construct comprising a promoter operably linked to a nucleic acid encoding the polypeptide or fragment thereof. In some aspects, the DNA construct may be is linearized prior to conducting an in vitro transcription reaction. The transcribed mRNA is then incubated with an appropriate cell-free translation extract, such as a rabbit reticulocyte extract, to produce the desired polypeptide or fragment thereof.

[0224] The expression vectors can contain one or more selectable marker genes to provide a phenotypic trait for selection of transformed host cells such as dihydrofolate reductase or neomycin resistance for eukaryotic cell culture, or such as tetracycline or ampicillin resistance in E. coli.

[0225] Amplification of Nucleic Acids

[0226] In practicing the invention, nucleic acids encoding the polypeptides of the invention, or modified nucleic acids, can be reproduced by, e.g., amplification. The invention provides amplification primer sequence pairs for amplifying nucleic acids encoding a hydrolase, e.g., an esterase, acylase, lipase, phospholipase or protease, where the primer pairs are capable of amplifying nucleic acid sequences including the exemplary nucleic acids of the invention SEQ ID NO:1, SEQ ID NO:3, SEQ ID NO:5, SEQ ID NO:7, SEQ ID NO:9, SEQ ID NO:11, SEQ ID NO:13, SEQ ID NO:15, SEQ ID NO:17, SEQ ID NO:19, SEQ ID NO:21, SEQ ID NO:23, SEQ ID NO:25, SEQ ID NO:27, SEQ ID NO:29, SEQ ID NO:31, SEQ ID NO:33, SEQ ID NO:35, SEQ ID NO:37, SEQ ID NO:39, SEQ ID NO:41, SEQ ID NO:43, SEQ ID NO:45, SEQ ID NO:47, SEQ ID NO:49, SEQ ID NO:51, SEQ ID NO:53, SEQ ID NO:55, SEQ ID NO:57, SEQ ID NO:59, SEQ ID NO:61, SEQ ID NO:63, SEQ ID NO:65, SEQ ID NO:67, SEQ ID NO:69, SEQ ID NO:71, SEQ ID NO:73, SEQ ID NO:75, SEQ ID NO:77, SEQ ID NO:79, SEQ ID NO:81, SEQ ID NO:83, SEQ ID NO:85, SEQ ID NO:87, SEQ ID NO:89, SEQ ID NO:91, SEQ ID NO:93, SEQ ID NO:95, SEQ ID NO:97, SEQ ID NO:99, SEQ ID NO:101, SEQ ID NO:103, SEQ ID NO:105, SEQ ID NO:107, SEQ ID NO:109, SEQ ID NO:11, SEQ ID NO:113, SEQ ID NO:115, SEQ ID NO:117, SEQ ID NO:119, SEQ ID NO:121, SEQ ID NO:123, SEQ ID NO:125, SEQ ID NO: 127, SEQ ID NO:129, SEQ ID NO:131, SEQ ID NO:133, SEQ ID NO:135, SEQ ID NO:137, SEQ ID NO:139, SEQ ID NO:141, SEQ ID NO:143, SEQ ID NO:145, SEQ ID NO: 147, SEQ ID NO:149, SEQ ID NO:151, SEQ ID NO:153, SEQ ID NO:155, SEQ ID NO:157, SEQ ID NO:159, SEQ ID NO:161, SEQ ID NO:163, SEQ ID NO:165, SEQ ID NO:167, SEQ ID NO:169, SEQ ID NO:171, SEQ ID NO:173, SEQ ID NO:175, SEQ ID NO:177, SEQ ID NO:179, SEQ ID NO:181, SEQ ID NO:183, SEQ ID NO:185, SEQ ID NO:187, SEQ ID NO:189, SEQ ID NO:191, SEQ ID NO:193, SEQ ID NO:195, SEQ ID NO:197, SEQ ID NO:199, SEQ ID NO:201, SEQ ID NO:203, SEQ ID NO:205, SEQ ID NO:207, SEQ ID NO:209, SEQ ID NO:211, SEQ ID NO:213, SEQ ID NO:215, SEQ ID NO:217, SEQ ID NO:219, SEQ ID NO:221, SEQ ID NO:223, SEQ ID NO:225, SEQ ID NO:227, SEQ ID NO:229, SEQ ID NO:231, SEQ ID NO:233, SEQ ID NO:235, SEQ ID NO:237, SEQ ID NO:239, SEQ ID NO:241, SEQ ID NO:243, SEQ ID NO:245, SEQ ID NO:247, SEQ ID NO:249, SEQ ID NO:251, SEQ ID NO:253, SEQ ID NO:255, SEQ ID NO:257, SEQ ID NO:259, SEQ ID NO:261, SEQ ID NO:263, SEQ ID NO:265, SEQ ID NO:267, SEQ ID NO:269, SEQ ID NO:271, SEQ ID NO:273, SEQ ID NO:275, SEQ ID NO:277, SEQ ID NO:279, SEQ ID NO:281, SEQ ID NO:283, SEQ ID NO:285, SEQ ID NO:287, SEQ ID NO:289, SEQ ID NO:291, SEQ ID NO:293, SEQ ID NO:295, SEQ ID NO:297, SEQ ID NO:299, SEQ ID NO:301, SEQ ID NO:303, SEQ ID NO:305, SEQ ID NO:307, SEQ ID NO:309, SEQ ID NO:311, SEQ ID NO:313, SEQ ID NO:315, SEQ ID NO:317, SEQ ID NO:319, SEQ ID NO:321, SEQ ID NO:323, SEQ ID NO:325, SEQ ID NO:327, SEQ ID NO:329, SEQ ID NO:331, SEQ ID NO:333, SEQ ID NO:335, SEQ ID NO:337, SEQ ID NO:339, SEQ ID NO:341, SEQ ID NO:343, SEQ ID NO:345, SEQ ID NO:347, SEQ ID NO:349, SEQ ID NO:351, SEQ ID NO:353, SEQ ID NO:355, SEQ ID NO:357, SEQ ID NO:359, SEQ ID NO:361, SEQ ID NO:363, SEQ ID NO:365, SEQ ID NO:367, SEQ ID NO:369, SEQ ID NO:371, SEQ ID NO:373, SEQ ID NO:375, SEQ ID NO:377, SEQ ID NO:379, SEQ ID NO:381, SEQ ID NO:383, SEQ ID NO:385, SEQ ID NO:387, SEQ ID NO:389, SEQ ID NO:391, SEQ ID NO:393, SEQ ID NO:395, SEQ ID NO:397, SEQ ID NO:399, SEQ ID NO:401, SEQ ID NO:403, SEQ ID NO:405, SEQ ID NO:407, SEQ ID NO:409, SEQ ID NO:411, SEQ ID NO:413, SEQ ID NO:415, SEQ ID NO:417, SEQ ID NO:419, SEQ ID NO:421, SEQ ID NO:423, SEQ ID NO:425, SEQ ID NO:427, SEQ ID NO:429, SEQ ID NO:431, SEQ ID NO:433, SEQ ID NO:435, SEQ ID NO:437, SEQ ID NO:439, SEQ ID NO:441, SEQ ID NO:443, SEQ ID NO:445, SEQ ID NO:447, SEQ ID NO:449, SEQ ID NO:451, SEQ ID NO:453, SEQ ID NO:455, SEQ ID NO:457, SEQ ID NO:459, SEQ ID NO:461, SEQ ID NO:463, SEQ ID NO:465, SEQ ID NO:467, SEQ ID NO:469, SEQ ID NO:471, SEQ ID NO:473, SEQ ID NO:475, SEQ ID NO:477, SEQ ID NO:479, SEQ ID NO:481, SEQ ID NO:483, SEQ ID NO:485, SEQ ID NO:487, SEQ ID NO:489, SEQ ID NO:491, SEQ ID NO:493, SEQ ID NO:495, SEQ ID NO:497, SEQ ID NO:499, SEQ ID NO:501, SEQ ID NO:503, SEQ ID NO:505, SEQ ID NO:507, SEQ ID NO:509, SEQ ID NO:511, SEQ ID NO:513, SEQ ID NO:515, SEQ ID NO:517, SEQ ID NO:519, SEQ ID NO:521, SEQ ID NO:523, SEQ ID NO:525, SEQ ID NO:527, SEQ ID NO:529, SEQ ID NO:531, SEQ ID NO:533, SEQ ID NO:535, SEQ ID NO:537, SEQ ID NO:539, SEQ ID NO:541, SEQ ID NO:543, SEQ ID NO:545, SEQ ID NO:547, SEQ ID NO:549, SEQ ID NO:561, SEQ ID NO:553, SEQ ID NO:555, SEQ ID NO:557, SEQ ID NO:559, SEQ ID NO:561, SEQ ID NO:563, SEQ ID NO:565, SEQ ID NO:567, SEQ ID NO:569, SEQ ID NO:571, SEQ ID NO:573, SEQ ID NO:575, SEQ ID NO:577, SEQ ID NO:579, SEQ ID NO:581, SEQ ID NO:583, SEQ ID NO:585, SEQ ID NO:587, SEQ ID NO:589, SEQ ID NO:591, SEQ ID NO:593, SEQ ID NO:595, SEQ ID NO:597, SEQ ID NO:599, SEQ ID NO:601, SEQ ID NO:603, SEQ ID NO:605, SEQ ID NO:607, SEQ ID NO:609, SEQ ID NO:611, SEQ ID NO:613, SEQ ID NO:615, SEQ ID NO:617, SEQ ID NO:619, SEQ ID NO:621, SEQ ID NO:623, SEQ ID NO:625, SEQ ID NO:627, SEQ ID NO:629, SEQ ID NO:631, SEQ ID NO:633, SEQ ID NO:635, SEQ ID NO:637, SEQ ID NO:639, SEQ ID NO:641, SEQ ID NO:643, SEQ ID NO:645, SEQ ID NO:647, SEQ ID NO:649, SEQ ID NO:651, SEQ ID NO:653, SEQ ID NO:655, SEQ ID NO:657, SEQ ID NO:659, SEQ ID NO:661, SEQ ID NO:663, SEQ ID NO:665, SEQ ID NO:667, SEQ ID NO:669, SEQ ID NO:671, SEQ ID NO:673, SEQ ID NO:675, SEQ ID NO:677, SEQ ID NO:679, SEQ ID NO:681, SEQ ID NO:683, SEQ ID NO:685, SEQ ID NO:687, SEQ ID NO:689, SEQ ID NO:691, SEQ ID NO:693, SEQ ID NO:695, SEQ ID NO:697, SEQ ID NO:699, SEQ ID NO:701, SEQ ID NO:703, SEQ ID NO:705, SEQ ID NO:707, SEQ ID NO:709, SEQ ID NO:711, SEQ ID NO:713, SEQ ID NO:715, SEQ ID NO:717, SEQ ID NO:719, SEQ ID NO:721, SEQ ID NO:723, SEQ ID NO:725, SEQ ID NO:727, SEQ ID NO:729, SEQ ID NO:731, SEQ ID NO:733, SEQ ID NO:735, SEQ ID NO:737, SEQ ID NO:739, SEQ ID NO:741, SEQ ID NO:743, SEQ ID NO:745, SEQ ID NO:747, SEQ ID NO:749, SEQ ID NO:751, SEQ ID NO:753, SEQ ID NO:755, SEQ ID NO:757, SEQ ID NO:759, SEQ ID NO:761, SEQ ID NO:763, SEQ ID NO:765, SEQ ID NO:767, SEQ ID NO:769, SEQ ID NO:771, SEQ ID NO:773, SEQ ID NO:775, SEQ ID NO:777, SEQ ID NO:779, SEQ ID NO:781, SEQ ID NO:783, SEQ ID NO:785, SEQ ID NO:787, SEQ ID NO:789, SEQ ID NO:791, SEQ ID NO:793, SEQ ID NO:795, SEQ ID NO:797, SEQ ID NO:799, SEQ ID NO:801, SEQ ID NO:803, SEQ ID NO:805, SEQ ID NO:807, SEQ ID NO:809, SEQ ID NO:811, SEQ ID NO:813, SEQ ID NO:815, SEQ ID NO:817, SEQ ID NO:819, SEQ ID NO:821, SEQ ID NO:823, SEQ ID NO:825, SEQ ID NO:827, SEQ ID NO:829, SEQ ID NO:831, SEQ ID NO:833, SEQ ID NO:835, SEQ ID NO:837, SEQ ID NO:839, SEQ ID NO:841, SEQ ID NO:843, SEQ ID NO:845, SEQ ID NO:847, SEQ ID NO:849, SEQ ID NO:851, SEQ ID NO:853, SEQ ID NO:855, SEQ ID NO:857, SEQ ID NO:859, SEQ ID NO:861, SEQ ID NO:863, SEQ ID NO:865, SEQ ID NO:867, SEQ ID NO:869, SEQ ID NO:871, SEQ ID NO:873, SEQ ID NO:875, SEQ ID NO:877, SEQ ID NO:879, SEQ ID NO:881, SEQ ID NO:883, SEQ ID NO:885, SEQ ID NO:887, SEQ ID NO:889, SEQ ID NO:891, SEQ ID NO:893, SEQ ID NO:895, SEQ ID NO:897, SEQ ID NO:899, SEQ ID NO:901, SEQ ID NO:903, SEQ ID NO:905, SEQ ID NO:907, SEQ ID NO:909, SEQ ID NO:911, SEQ ID NO:913, SEQ ID NO:915, SEQ ID NO:917, SEQ ID NO:919, SEQ ID NO:921, SEQ ID NO:923, SEQ ID NO:925, SEQ ID NO:927, SEQ ID NO:929, SEQ ID NO:931, SEQ ID NO:933, SEQ ID NO:935, SEQ ID NO:937, SEQ ID NO:939, SEQ ID NO:941, SEQ ID NO:943, SEQ ID NO:945, SEQ ID NO:947, SEQ ID NO:949, SEQ ID NO:951, SEQ ID NO:953, SEQ ID NO:955, SEQ ID NO:957, SEQ ID NO:959, SEQ ID NO:961, SEQ ID NO:963, SEQ ID NO:965, SEQ ID NO:967, SEQ ID NO:969, SEQ ID NO:971, SEQ ID NO:973, SEQ ID NO:975, SEQ ID NO:977, SEQ ID NO:979, SEQ ID NO:981, SEQ ID NO:983, SEQ ID NO:985, SEQ ID NO:987, SEQ ID NO:989, and SEQ ID NO:991. One of skill in the art can design amplification primer sequence pairs for any part of or the full length of these sequences.

[0227] Amplification reactions can also be used to quantify the amount of nucleic acid in a sample (such as the amount of message in a cell sample), label the nucleic acid (e.g., to apply it to an array or a blot), detect the nucleic acid, or quantify the amount of a specific nucleic acid in a sample. In one aspect of the invention, message isolated from a cell or a cDNA library are amplified. The skilled artisan can select and design suitable oligonucleotide amplification primers. Amplification methods are also well known in the art, and include, e.g., polymerase chain reaction, PCR (see, e.g., PCR PROTOCOLS, A GUIDE TO METHODS AND APPLICATIONS, ed. Innis, Academic Press, N.Y. (1990) and PCR STRATEGIES (1995), ed. Innis, Academic Press, Inc., N.Y., ligase chain reaction (LCR) (see, e.g., Wu (1989) Genomics 4:560; Landegren (1988) Science 241:1077; Barringer (1990) Gene 89:117); transcription amplification (see, e.g., Kwoh (1989) Proc. Natl. Acad. Sci. USA 86:1173); and, self-sustained sequence replication (see, e.g., Guatelli (1990) Proc. Natl. Acad. Sci. USA 87:1874); Q Beta replicase amplification (see, e.g., Smith (1997) J. Clin. Microbiol. 35:1477-1491), automated Q-beta replicase amplification assay (see, e.g., Burg (1996) Mol. Cell. Probes 10:257-271) and other RNA polymerase mediated techniques (e.g., NASBA, Cangene, Mississauga, Ontario); see also Berger (1987) Methods Enzymol. 152:307-316; Sambrook; Ausubel; U.S. Pat. Nos. 4,683,195 and 4,683,202; Sooknanan (1995) Biotechnology 13:563-564.

[0228] The invention also provides amplification primer pairs comprising sequences of the invention, for example, wherein the primer pair comprises a first member having a sequence as setforth by about the first (the 5′) 12, 13, 14, 15, 16, 17, 18, 19, 20, 21, 22, 23, 24, 25, 26, 27, 28, 29, 30, 31, 32, 33, 34, 35, 36, 37, 38, 39 or 40 or more residues of a nucleic acid of the invention, and a second member having a sequence as set forth by about the first (the 5′) 12, 13, 14, 15, 16, 17, 18, 19, 20, 21, 22, 23, 24, 25, 26, 27, 28, 29, 30, 31, 32, 33, 34, 35, 36, 37, 38, 39 or 40 or more residues of the complementary strand of the first member.

### Determining the Degree of Sequence Identity

[0229] The invention provides nucleic acids having at least nucleic acid, or complete (100%) sequence identity to a nucleic acid of the invention, e.g., an exemplary nucleic acid of the invention (e.g., having a sequence as set forth in SEQ ID NO:1, SEQ ID NO:3, SEQ ID NO:5, SEQ ID NO:7, SEQ ID NO:9, SEQ ID NO:11, etc.); and polypeptides having at least 50%, 51%, 52%, 53%, 54%, 55%, 56%, 57%, 58%, 59%, 60%, 61%, 62%, 63%, 64%, 65%, 66%, 67%, 68%, 69%, 70%, 71%, 72%, 73%, 74%, 75%, 76%, 77%, 78%, 79%, 80%, 81%, 82%, 83%, 84%, 85%, 86%, 87%, 88%, 89%, 90%, 91%, 92%, 93%, 94%, 95%, 96%, 97%, 98%, 99%, or more, or complete (100%) sequence identity to a polypeptide of the invention, e.g., an exemplary polypeptide having a sequence as set forth in SEQ ID NO:2, SEQ ID NO:4, SEQ ID NO:6, SEQ ID NO:8, SEQ ID NO:10, SEQ ID NO:12, etc. In alternative aspects, the sequence identity can be over a region of at least about 5, 10, 20, 30, 40, 50, 100, 150, 200, 250, 300, 350, 400, 450, 500, 550, 600, 650, 700, 750, 800, 850, 900, 950, 1000, or more consecutive residues, or the full length of the nucleic acid or polypeptide. The extent of sequence identity (homology) may be determined using any computer program and associated parameters, including those described herein, such as BLAST 2.2.2. or FASTA version 3.0t78, with the default parameters.

[0230] FIG. 30 is a chart describing selected characteristics of exemplary nucleic acids and polypeptides of the invention, including sequence identity comparison of the exemplary sequences to public databases. All sequences described in FIG. 30 have been subject to a BLAST search (as described in detail, below) against two sets of databases. The first database set is available through NCBI (National Center for Biotechnology Information). All results from searches against these databases are found in the columns entitled “NR Description”, “NR Accession Code”, “NR Evalue” or “NR Organism”. “NR” refers to the Non-Redundant nucleotide database maintained by NCBI. This database is a composite of GenBank, GenBank updates, and EMBL updates. The entries in the column “NR Description” refer to the definition line in any given NCBI record, which includes a description of the sequence, such as the source organism, gene name/protein name, or some description of the function of the sequence. The entries in the column “NR Accession Code” refer to the unique identifier given to a sequence record. The entries in the column “NR Evalue” refer to the Expect value (Evalue), which represents the probability that an alignment score as good as the one found between the query sequence (the sequences of the invention) and a database sequence would be found in the same number of comparisons between random sequences as was done in the present BLAST search. The entries in the column “NR Organism” refer to the source organism of the sequence identified as the closest BLAST hit. The second set of databases is collectively known as the Geneseq™ database, which is available through Thomson Derwent (Philadelphia, Pa.). All results from searches against this database are found in the columns entitled “Geneseq Protein Description”, “Geneseq Protein Accession Code”, “Geneseq Protein Evalue”, “Geneseq DNA Description”, “Geneseq DNA Accession Code” or “Geneseq DNA Evalue”. The information found in these columns is comparable to the information found in the NR columns described above, except that it was derived from BLAST searches against the Genesemq database instead of the NCBI databases. In addition, this table includes the column “Predicted EC No.”. An EC number is the number assigned to a type of enzyme according to a scheme of standardized enzyme nomenclature developed by the Enzyme Commission of the Nomenclature Committee of the International Union of Biochemistry and Molecular Biology (IUBMB). The results in the “Predicted EC No.” column are determined by a BLAST search against the Kegg (Kyoto Encyclopedia of Genes and Genomes) database. If the top BLAST match has an Evalue equal to or less than e⁻⁶, the EC number assigned to the top match is entered into the table. The EC number of the top hit is used as a guide to what the EC number of the sequence of the invention might be. The columns “Query DNA Length” and “Query Protein Length” refer to the number of nucleotides or the number amino acids, respectively, in the sequence of the invention that was searched or queried against either the NCBI or Geneseq databases. The columns “Geneseq or NR DNA Length” and “Geneseq or NR Protein Length” refer to the number of nucleotides or the number amino acids, respectively, in the sequence of the top match from the BLAST search. The results provided in these columns are from the search that returned the lower Evalue, either from the NCBI databases or the Geneseq database. The columns “Geneseq or NR % ID Protein” and “Geneseq or NR % ID DNA” refer to the percent sequence identity between the sequence of the invention and the sequence of the top BLAST match. The results provided in these columns are from the search that returned the lower Evalue, either from the NCBI databases or the Geneseq database.

[0231] The phrase “substantially identical” in the context of two nucleic acids or polypeptides, can refer to two or more sequences that have, e.g., at least about 50%, 51%, 52%, 53%, 54%, 55%, 56%, 57%, 58%, 59%, 60%, 61%, 62%, 63%, 64%, 65%, 66%, 67%, 68%, 69%, 70%, 71%, 72%, 73%, 74%, 75%, 76%, 77%, 78%, 79%, 80%, 81%, 82%, 83%, 84%, 85%, 86%, 87%, 88%, 89%, 90%, 91%, 92%, 93%, 94%, 95%, 96%, 97%, 98%, 99% or more, nucleotide or amino acid residue (sequence) identity, when compared and aligned for maximum correspondence, as measured using one any known sequence comparison algorithm, as discussed in detail below, or by visual inspection. In alternative aspects, the invention provides nucleic acid and polypeptide sequences having substantial identity to a nucleic acid of the invention, e.g., an exemplary sequence of the invention, over a region of at least about 10, 20, 30, 40, 50, 100, 150, 200, 250, 300, 350, 400, 450, 500, 550, 600, 650, 700, 750, 800, 850, 900, 950, 1000 residues, or a region ranging from between about 50 residues to the full length of the nucleic acid or polypeptide. Nucleic acid sequences of the invention can be substantially identical over the entire length of a polypeptide coding region.

[0232] Additionally a “substantially identical” amino acid sequence is a sequence that differs from a reference sequence by one or more conservative or non-conservative amino acid substitutions, deletions, or insertions, particularly when such a substitution occurs at a site that is not the active site of the molecule, and provided that the polypeptide essentially retains its functional properties. A conservative amino acid substitution, for example, substitutes one amino acid for another of the same class (e.g., substitution of one hydrophobic amino acid, such as isoleucine, valine, leucine, or methionine, for another, or substitution of one polar amino acid for another, such as substitution of arginine for lysine, glutamic acid for aspartic acid or glutamine for asparagine). One or more amino acids can be deleted, for example, from a hydrolase, resulting in modification of the structure of the polypeptide, without significantly altering its biological activity. For example, amino- or carboxyl-terminal amino acids that are not required for hydrolase activity can be removed.

[0233] Homologous sequences also include RNA sequences in which uridines replace the thymines in the nucleic acid sequences. The homologous sequences may be obtained using any of the procedures described herein or may result from the correction of a sequencing error. It will be appreciated that the nucleic acid sequences as set forth herein can be represented in the traditional single character format (see, e.g., Stryer, Lubert. Biochemistry, 3rd Ed., W. H Freeman & Co., New York) or in any other format which records the identity of the nucleotides in a sequence.

[0234] Various sequence comparison programs identified herein are used in this aspect of the invention. Protein and/or nucleic acid sequence identities (homologies) may be evaluated using any of the variety of sequence comparison algorithms and programs known in the art. Such algorithms and programs include, but are not limited to, TBLASTN, BLASTP, FASTA, TFASTA, and CLUSTALW (Pearson and Lipman, Proc. Natl. Acad. Sci. USA 85(8):2444-2448, 1988; Altschul et al., J. Mol. Biol. 215(3):403-410, 1990; Thompson et al., Nucleic Acids Res. 22(2):4673-4680, 1994; Higgins et al., Methods Enzymol. 266:383-402, 1996; Altschul et al., J. Mol. Biol. 215(3):403-410, 1990; Altschul et al., Nature Genetics 3:266-272, 1993).

[0235] Homology or identity can be measured using sequence analysis software (e.g., Sequence Analysis Software Package of the Genetics Computer Group, University of Wisconsin Biotechnology Center, 1710 University Avenue, Madison, Wis. 53705). Such software matches similar sequences by assigning degrees of homology to various deletions, substitutions and other modifications. The terms “homology” and “identity” in the context of two or more nucleic acids or polypeptide sequences, refer to two or more sequences or subsequences that are the same or have a specified percentage of amino acid residues or nucleotides that are the same when compared and aligned for maximum correspondence over a comparison window or designated region as measured using any number of sequence comparison algorithms or by manual alignment and visual inspection. For sequence comparison, one sequence can act as a reference sequence (e.g., an exemplary nucleic acid or polypeptide sequence of the invention) to which test sequences are compared. When using a sequence comparison algorithm, test and reference sequences are entered into a computer, subsequence coordinates are designated, if necessary, and sequence algorithm program parameters are designated. Default program parameters can be used, or alternative parameters can be designated. The sequence comparison algorithm then calculates the percent sequence identities for the test sequences relative to the reference sequence, based on the program parameters.

[0236] As used herein, the terms “computer,” “computer program” and “processor” are used in their broadest general contexts and incorporate all such devices, as described in detail, below. A “comparison window”, as used herein, includes reference to a segment of any one of the numbers of contiguous residues. For example, in alternative aspects of the invention, continugous residues ranging anywhere from 20 to the full length of an exemplary polypeptide or nucleic acid sequence of the invention, are compared to a reference sequence of the same number of contiguous positions after the two sequences are optimally aligned. If the reference sequence has the requisite sequence identity to an exemplary polypeptide or nucleic acid sequence of the invention, e.g., in alternative aspects, 50%, 51%, 52%, 53%, 54%, 55%, 56%, 57%, 58%, 59%, 60%, 61%, 62%, 63%, 64%, 65%, 66%, 67%, 68%, 69%, 70%, 71%, 72%, 73%, 74%, 75%, 76%, 77%, 78%, 79%, 80%, 81%, 82%, 83%, 84%, 85%, 86%, 87%, 88%, 89%, 90%, 91%, 92%, 93%, 94%, 95%, 96%, 97%, 98%, 99%, or more, or complete (100%) sequence identity to an exemplary polypeptide or nucleic acid sequence of the invention, that sequence is within the scope of the invention. In alternative embodiments, subsequences ranging from about 20 to 600, about 50 to 200, and about 100 to 150 are compared to a reference sequence of the same number of contiguous positions after the two sequences are optimally aligned. Methods of alignment of sequence for comparison are well known in the art. Optimal alignment of sequences for comparison can be conducted, e.g., by the local homology algorithm of Smith & Waterman, Adv. Appl. Math. 2:482, 1981, by the homology alignment algorithm of Needleman & Wunsch, J. Mol. Biol. 48:443, 1970, by the search for similarity method of person & Lipman, Proc. Nat'l. Acad. Sci. USA 85:2444, 1988, by computerized implementations of these algorithms (GAP, BESTFIT, FASTA, and TFASTA in the Wisconsin Genetics Software Package, Genetics Computer Group, 575 Science Dr., Madison, Wis.), or by manual alignment and visual inspection. Other algorithms for determining homology or identity include, for example, in addition to a BLAST program (Basic Local Alignment Search Tool at the National Center for Biological Information), ALIGN, AMAS (Analysis of Multiply Aligned Sequences), AMPS (Protein Multiple Sequence Alignment), ASSET (Aligned Segment Statistical Evaluation Tool), BANDS, BESTSCOR, BIOSCAN (Biological Sequence Comparative Analysis Node), BLIMPS (BLocks IMProved Searcher), FASTA, Intervals & Points, BMB, CLUSTAL V, CLUSTAL W, CONSENSUS, LCONSENSUS, WCONSENSUS, Smith-Waterman algorithm, DARWIN, Las Vegas algorithm, FNAT (Forced Nucleotide Alignment Tool), Framealign, Framesearch, DYNAMIC, FILTER, FSAP (Fristensky Sequence Analysis Package), GAP (Global Alignment Program), GENAL, GIBBS, GenQuest, ISSC (Sensitive Sequence Comparison), LALIGN (Local Sequence Alignment), LCP (Local Content Program), MACAW (Multiple Alignment Construction & Analysis Workbench), MAP (Multiple Alignment Program), MBLKP, MBLKN, PIMA (Pattern-Induced Multi-sequence Alignment), SAGA (Sequence Alignment by Genetic Algorithm) and WHAT-IF. Such alignment programs can also be used to screen genome databases to identify polynucleotide sequences having substantially identical sequences. A number of genome databases are available, for example, a substantial portion of the human genome is available as part of the Human Genome Sequencing Project (Gibbs, 1995). Several genomes have been sequenced, e.g., M. genitalium (Fraser et al., 1995), M. jannaschii (Bult et al., 1996), H. influenzae (Fleischmann et al., 1995), E. coli (Blattner et al., 1997), and yeast (S. cerevisiae) (Mewes et al., 1997), and D. melanogaster (Adams et al., 2000). Significant progress has also been made in sequencing the genomes of model organism, such as mouse, C. elegans, and Arabadopsis sp. Databases containing genomic information annotated with some functional information are maintained by different organization, and are accessible via the internet.

[0237] BLAST, BLAST 2.0 and BLAST 2.2.2 algorithms are also used to practice the invention. They are described, e.g., in Altschul (1977) Nuc. Acids Res. 25:3389-3402; Altschul (1990) J. Mol. Biol. 215:403-410. Software for performing BLAST analyses is publicly available through the National Center for Biotechnology Information. This algorithm involves first identifying high scoring sequence pairs (HSPs) by identifying short words of length W in the query sequence, which either match or satisfy some positive-valued threshold score T when aligned with a word of the same length in a database sequence. T is referred to as the neighborhood word score threshold (Altschul (1990) supra). These initial neighborhood word hits act as seeds for initiating searches to find longer HSPs containing them. The word hits are extended in both directions along each sequence for as far as the cumulative alignment score can be increased. Cumulative scores are calculated using, for nucleotide sequences, the parameters M (reward score for a pair of matching residues; always >0). For amino acid sequences, a scoring matrix is used to calculate the cumulative score. Extension of the word hits in each direction are halted when: the cumulative alignment score falls off by the quantity X from its maximum achieved value; the cumulative score goes to zero or below, due to the accumulation of one or more negative-scoring residue alignments; or the end of either sequence is reached. The BLAST algorithm parameters W, T, and X determine the sensitivity and speed of the alignment. The BLASTN program (for nucleotide sequences) uses as defaults a wordlength (W) of 11, an expectation (E) of 10, M=5, N=−4 and a comparison of both strands. For amino acid sequences, the BLASTP program uses as defaults a wordlength of 3, and expectations (E) of 10, and the BLOSUM62 scoring matrix (see Henikoff & Henikoff (1989) Proc. Natl. Acad. Sci. USA 89:10915) alignments (B) of 50, expectation (E) of 10, M=5, N=−4, and a comparison of both strands. The BLAST algorithm also performs a statistical analysis of the similarity between two sequences (see, e.g., Karlin & Altschul (1993) Proc. Natl. Acad. Sci. USA 90:5873). One measure of similarity provided by BLAST algorithm is the smallest sum probability (P(N)), which provides an indication of the probability by which a match between two nucleotide or amino acid sequences would occur by chance. For example, a nucleic acid is considered similar to a references sequence if the smallest sum probability in a comparison of the test nucleic acid to the reference nucleic acid is less than about 0.2, more preferably less than about 0.01, and most preferably less than about 0.001. In one aspect, protein and nucleic acid sequence homologies are evaluated using the Basic Local Alignment Search Tool (“BLAST”). For example, five specific BLAST programs can be used to perform the following task: (1) BLASTP and BLAST3 compare an amino acid query sequence against a protein sequence database; (2) BLASTN compares a nucleotide query sequence against a nucleotide sequence database; (3) BLASTX compares the six-frame conceptual translation products of a query nucleotide sequence (both strands) against a protein sequence database; (4) TBLASTN compares a query protein sequence against a nucleotide sequence database translated in all six reading frames (both strands); and, (5) TBLASTX compares the six-frame translations of a nucleotide query sequence against the six-frame translations of a nucleotide sequence database. The BLAST programs identify homologous sequences by identifying similar segments, which are referred to herein as “high-scoring segment pairs,” between a query amino or nucleic acid sequence and a test sequence which is preferably obtained from a protein or nucleic acid sequence database. High-scoring segment pairs are preferably identified (i.e., aligned) by means of a scoring matrix, many of which are known in the art. Preferably, the scoring matrix used is the BLOSUM62 matrix (Gonnet et al., Science 256:1443-1445, 1992; Henikoff and Henikoff, Proteins 17:49-61, 1993). Less preferably, the PAM or PAM250 matrices may also be used (see, e.g., Schwartz and Dayhoff, eds., 1978, Matrices for Detecting Distance Relationships: Atlas of Protein Sequence and Structure, Washington: National Biomedical Research Foundation).

[0238] In one aspect of the invention, to determine if a nucleic acid has the requisite sequence identity to be within the scope of the invention, the NCBI BLAST 2.2.2 programs is used, default options to blastp. There are about 38 setting options in the BLAST 2.2.2 program. In this exemplary aspect of the invention, all default values are used except for the default filtering setting (i.e., all parameters set to default except filtering which is set to OFF); in its place a “-F F” setting is used, which disables filtering. Use of default filtering often results in Karlin-Altschul violations due to short length of sequence.

[0239] The default values used in this exemplary aspect of the invention, and to determine the values in FIG. 30, as discussed above, include:

[0240] “Filter for low complexity: ON

[0241] Word Size: 3

[0242] Matrix: Blosum62

[0243] Gap Costs Existence: 11

[0244] Extension: 1”

[0245] Other default settings are: filter for low complexity OFF, word size of 3 for protein, BLOSUM62 matrix, gap existence penalty of −11 and a gap extension penalty of −1. An exemplary NCBI BLAST 2.2.2 program setting is set forth in Example 1, below. Note that the “—W” option defaults to 0. This means that, if not set, the word size defaults to 3 for proteins and 11 for nucleotides.

### Computer Systems and Computer Program Products

[0246] To determine and identify sequence identities, structural homologies, motifs and the like in silico, the sequence of the invention can be stored, recorded, and manipulated on any medium which can be read and accessed by a computer. Accordingly, the invention provides computers, computer systems, computer readable mediums, computer programs products and the like recorded or stored thereon the nucleic acid and polypeptide sequences of the invention. As used herein, the words “recorded” and “stored” refer to a process for storing information on a computer medium. A skilled artisan can readily adopt any known methods for recording information on a computer readable medium to generate manufactures comprising one or more of the nucleic acid and/or polypeptide sequences of the invention.

[0247] Another aspect of the invention is a computer readable medium having recorded thereon at least one nucleic acid and/or polypeptide sequence of the invention. Computer readable media include magnetically readable media, optically readable media, electronically readable media and magnetic/optical media. For example, the computer readable media may be a hard disk, a floppy disk, a magnetic tape, CD-ROM, Digital Versatile Disk (DVD), Random Access Memory (RAM), or Read Only Memory (ROM) as well as other types of other media known to those skilled in the art.

[0248] Aspects of the invention include systems (e.g., internet based systems), particularly computer systems, which store and manipulate the sequences and sequence information described herein. One example of a computer system 100 is illustrated in block diagram form in FIG. 1. As used herein, “a computer system” refers to the hardware components, software components, and data storage components used to analyze a nucleotide or polypeptide sequence of the invention. The computer system 100 can include a processor for processing, accessing and manipulating the sequence data. The processor 105 can be any well-known type of central processing unit, such as, for example, the Pentium III from Intel Corporation, or similar processor from Sun, Motorola, Compaq, AMD or International Business Machines. The computer system 100 is a general purpose system that comprises the processor 105 and one or more internal data storage components 110 for storing data, and one or more data retrieving devices for retrieving the data stored on the data storage components. A skilled artisan can readily appreciate that any one of the currently available computer systems are suitable.

[0249] In one aspect, the computer system 100 includes a processor 105 connected to a bus which is connected to a main memory 115 (preferably implemented as RAM) and one or more internal data storage devices 110, such as a hard drive and/or other computer readable media having data recorded thereon. The computer system 100 can further include one or more data retrieving device 118 for reading the data stored on the internal data storage devices 110. The data retrieving device 118 may represent, for example, a floppy disk drive, a compact disk drive, a magnetic tape drive, or a modem capable of connection to a remote data storage system (e.g., via the internet) etc. In some embodiments, the internal data storage device 110 is a removable computer readable medium such as a floppy disk, a compact disk, a magnetic tape, etc. containing control logic and/or data recorded thereon. The computer system 100 may advantageously include or be programmed by appropriate software for reading the control logic and/or the data from the data storage component once inserted in the data retrieving device. The computer system 100 includes a display 120 which is used to display output to a computer user. It should also be noted that the computer system 100 can be linked to other computer systems 125a-c in a network or wide area network to provide centralized access to the computer system 100. Software for accessing and processing the nucleotide or amino acid sequences of the invention can reside in main memory 115 during execution. In some aspects, the computer system 100 may further comprise a sequence comparison algorithm for comparing a nucleic acid sequence of the invention. The algorithm and sequence(s) can be stored on a computer readable medium. A “sequence comparison algorithm” refers to one or more programs which are implemented (locally or remotely) on the computer system 100 to compare a nucleotide sequence with other nucleotide sequences and/or compounds stored within a data storage means. For example, the sequence comparison algorithm may compare the nucleotide sequences of the invention stored on a computer readable medium to reference sequences stored on a computer readable medium to identify homologies or structural motifs.

[0250] The parameters used with the above algorithms may be adapted depending on the sequence length and degree of homology studied. In some aspects, the parameters may be the default parameters used by the algorithms in the absence of instructions from the user. FIG. 2 is a flow diagram illustrating one aspect of a process 200 for comparing a new nucleotide or protein sequence with a database of sequences in order to determine the homology levels between the new sequence and the sequences in the database. The database of sequences can be a private database stored within the computer system 100, or a public database such as GENBANK that is available through the Internet. The process 200 begins at a start state 201 and then moves to a state 202 wherein the new sequence to be compared is stored to a memory in a computer system 100. As discussed above, the memory could be any type of memory, including RAM or an internal storage device. The process 200 then moves to a state 204 wherein a database of sequences is opened for analysis and comparison. The process 200 then moves to a state 206 wherein the first sequence stored in the database is read into a memory on the computer. A comparison is then performed at a state 210 to determine if the first sequence is the same as the second sequence. It is important to note that this step is not limited to performing an exact comparison between the new sequence and the first sequence in the database. Well-known methods are known to those of skill in the art for comparing two nucleotide or protein sequences, even if they are not identical. For example, gaps can be introduced into one sequence in order to raise the homology level between the two tested sequences. The parameters that control whether gaps or other features are introduced into a sequence during comparison are normally entered by the user of the computer system. Once a comparison of the two sequences has been performed at the state 210, a determination is made at a decision state 210 whether the two sequences are the same. Of course, the term “same” is not limited to sequences that are absolutely identical. Sequences that are within the homology parameters entered by the user will be marked as “same” in the process 200. If a determination is made that the two sequences are the same, the process 200 moves to a state 214 wherein the name of the sequence from the database is displayed to the user. This state notifies the user that the sequence with the displayed name fulfills the homology constraints that were entered. Once the name of the stored sequence is displayed to the user, the process 200 moves to a decision state 218 wherein a determination is made whether more sequences exist in the database. If no more sequences exist in the database, then the process 200 terminates at an end state 220. However, if more sequences do exist in the database, then the process 200 moves to a state 224 wherein a pointer is moved to the next sequence in the database so that it can be compared to the new sequence. In this manner, the new sequence is aligned and compared with every sequence in the database. It should be noted that if a determination had been made at the decision state 212 that the sequences were not homologous, then the process 200 would move immediately to the decision state 218 in order to determine if any other sequences were available in the database for comparison. Accordingly, one aspect of the invention is a computer system comprising a processor, a data storage device having stored thereon a nucleic acid sequence of the invention and a sequence comparer for conducting the comparison. The sequence comparer may indicate a homology level between the sequences compared or identify structural motifs, or it may identify structural motifs in sequences which are compared to these nucleic acid codes and polypeptide codes. FIG. 3 is a flow diagram illustrating one embodiment of a process 250 in a computer for determining whether two sequences are homologous. The process 250 begins at a start state 252 and then moves to a state 254 wherein a first sequence to be compared is stored to a memory. The second sequence to be compared is then stored to a memory at a state 256. The process 250 then moves to a state 260 wherein the first character in the first sequence is read and then to a state 262 wherein the first character of the second sequence is read. It should be understood that if the sequence is a nucleotide sequence, then the character would normally be either A, T, C, G or U. If the sequence is a protein sequence, then it can be a single letter amino acid code so that the first and sequence sequences can be easily compared. A determination is then made at a decision state 264 whether the two characters are the same. If they are the same, then the process 250 moves to a state 268 wherein the next characters in the first and second sequences are read. A determination is then made whether the next characters are the same. If they are, then the process 250 continues this loop until two characters are not the same. If a determination is made that the next two characters are not the same, the process 250 moves to a decision state 274 to determine whether there are any more characters either sequence to read. If there are not any more characters to read, then the process 250 moves to a state 276 wherein the level of homology between the first and second sequences is displayed to the user. The level of homology is determined by calculating the proportion of characters between the sequences that were the same out of the total number of sequences in the first sequence. Thus, if every character in a first 100 nucleotide sequence aligned with an every character in a second sequence, the homology level would be 100%.

[0251] Alternatively, the computer program can compare a reference sequence to a sequence of the invention to determine whether the sequences differ at one or more positions. The program can record the length and identity of inserted, deleted or substituted nucleotides or amino acid residues with respect to the sequence of either the reference or the invention. The computer program may be a program which determines whether a reference sequence contains a single nucleotide polymorphism (SNP) with respect to a sequence of the invention, or, whether a sequence of the invention comprises a SNP of a known sequence. Thus, in some aspects, the computer program is a program which identifies SNPs. The method may be implemented by the computer systems described above and the method illustrated in FIG. 3. The method can be performed by reading a sequence of the invention and the reference sequences through the use of the computer program and identifying differences with the computer program.

[0252] In other aspects the computer based system comprises an identifier for identifying features within a nucleic acid or polypeptide of the invention. An “identifier” refers to one or more programs which identifies certain features within a nucleic acid sequence. For example, an identifier may comprise a program which identifies an open reading frame (ORF) in a nucleic acid sequence. FIG. 4 is a flow diagram illustrating one aspect of an identifier process 300 for detecting the presence of a feature in a sequence. The process 300 begins at a start state 302 and then moves to a state 304 wherein a first sequence that is to be checked for features is stored to a memory 115 in the computer system 100. The process 300 then moves to a state 306 wherein a database of sequence features is opened. Such a database would include a list of each feature's attributes along with the name of the feature. For example, a feature name could be “Initiation Codon” and the attribute would be “ATG”. Another example would be the feature name “TAATAA Box” and the feature attribute would be “TAATAA”. An example of such a database is produced by the University of Wisconsin Genetics Computer Group. Alternatively, the features may be structural polypeptide motifs such as alpha helices, beta sheets, or functional polypeptide motifs such as enzymatic active sites, helix-turn-helix motifs or other motifs known to those skilled in the art. Once the database of features is opened at the state 306, the process 300 moves to a state 308 wherein the first feature is read from the database. A comparison of the attribute of the first feature with the first sequence is then made at a state 310. A determination is then made at a decision state 316 whether the attribute of the feature was found in the first sequence. If the attribute was found, then the process 300 moves to a state 318 wherein the name of the found feature is displayed to the user. The process 300 then moves to a decision state 320 wherein a determination is made whether move features exist in the database. If no more features do exist, then the process 300 terminates at an end state 324. However, if more features do exist in the database, then the process 300 reads the next sequence feature at a state 326 and loops back to the state 310 wherein the attribute of the next feature is compared against the first sequence. If the feature attribute is not found in the first sequence at the decision state 316, the process 300 moves directly to the decision state 320 in order to determine if any more features exist in the database. Thus, in one aspect, the invention provides a computer program that identifies open reading frames (ORFs).

[0253] A polypeptide or nucleic acid sequence of the invention may be stored and manipulated in a variety of data processor programs in a variety of formats. For example, a sequence can be stored as text in a word processing file, such as MicrosoftWORD or WORDPERFECT or as an ASCII file in a variety of database programs familiar to those of skill in the art, such as DB2, SYBASE, or ORACLE. In addition, many computer programs and databases may be used as sequence comparison algorithms, identifiers, or sources of reference nucleotide sequences or polypeptide sequences to be compared to a nucleic acid sequence of the invention. The programs and databases used to practice the invention include, but are not limited to: MacPattern (EMBL), DiscoveryBase (Molecular Applications Group), GeneMine (Molecular Applications Group), Look (Molecular Applications Group), MacLook (Molecular Applications Group), BLAST and BLAST2 (NCBI), BLASTN and BLASTX (Altschul et al, J. Mol. Biol. 215:403, 1990), FASTA (Pearson and Lipman, Proc. Natl. Acad. Sci. USA, 85: 2444, 1988), FASTDB (Brutlag et al. Comp. App. Biosci. 6:237-245, 1990), Catalyst (Molecular Simulations Inc.), Catalyst/SHAPE (Molecular Simulations Inc.), Cerius2.DBAccess (Molecular Simulations Inc.), HypoGen (Molecular Simulations Inc.), Insight II, (Molecular Simulations Inc.), Discover (Molecular Simulations Inc.), CHARMm (Molecular Simulations Inc.), Felix (Molecular Simulations Inc.), DelPhi, (Molecular Simulations Inc.), QuanteMM, (Molecular Simulations Inc.), Homology (Molecular Simulations Inc.), Modeler (Molecular Simulations Inc.), ISIS (Molecular Simulations Inc.), Quanta/Protein Design (Molecular Simulations Inc.), WebLab (Molecular Simulations Inc.), WebLab Diversity Explorer (Molecular Simulations Inc.), Gene Explorer (Molecular Simulations Inc.), SeqFold (Molecular Simulations Inc.), the MDL Available Chemicals Directory database, the MDL Drug Data Report data base, the Comprehensive Medicinal Chemistry database, Derwent's World Drug Index database, the BioByteMasterFile database, the Genbank database, and the Genseqn database. Many other programs and data bases would be apparent to one of skill in the art given the present disclosure.

[0254] Motifs which may be detected using the above programs include sequences encoding leucine zippers, helix-turn-helix motifs, glycosylation sites, ubiquitination sites, alpha helices, and beta sheets, signal sequences encoding signal peptides which direct the secretion of the encoded proteins, sequences implicated in transcription regulation such as homeoboxes, acidic stretches, enzymatic active sites, substrate binding sites, and enzymatic cleavage sites.

### Hybridization of Nucleic Acids

[0255] The invention provides isolated or recombinant nucleic acids that hybridize under stringent conditions to nucleic acid of the invention, e.g., an exemplary sequence of the invention, e.g., a sequence as set forth in SEQ ID NO:1, SEQ ID NO:3, SEQ ID NO:5, SEQ ID NO:7, SEQ ID NO:9, SEQ ID NO:11, etc., and subsequences thereof, or a nucleic acid that encodes a polypeptide of the invention. The stringent conditions can be highly stringent conditions, medium stringent conditions, low stringent conditions, including the high and reduced stringency conditions described herein.

[0256] In alternative embodiments, nucleic acids of the invention as defined by their ability to hybridize under stringent conditions can be between about five residues and the full length of nucleic acid of the invention; e.g., they can be at least 5, 10, 15, 20, 25, 30, 35, 40, 50, 55, 60, 65, 70, 75, 80, 90, 100, 150, 200, 250, 300, 350, 400, 450, 500, 550, 600, 650, 700, 750, 800, 850, 900, 950, 1000, or more, residues in length. Nucleic acids shorter than full length are also included. These nucleic acids can be useful as, e.g., hybridization probes, labeling probes, PCR oligonucleotide probes, iRNA, antisense or sequences encoding antibody binding peptides (epitopes), motifs, active sites and the like.

[0257] In one aspect, nucleic acids of the invention are defined by their ability to hybridize under high stringency comprises conditions of about 50% formamide at about 37° C. to 42° C. In one aspect, nucleic acids of the invention are defined by their ability to hybridize under reduced stringency comprising conditions in about 35% to 25% formamide at about 30° C. to 35° C.

[0258] Alternatively, nucleic acids of the invention are defined by their ability to hybridize under high stringency comprising conditions at 42° C. in 50% formamide, 5×SSPE, 0.3% SDS, and a repetitive sequence blocking nucleic acid, such as cot-1 or salmon sperm DNA (e.g., 200 n/ml sheared and denatured salmon sperm DNA). In one aspect, nucleic acids of the invention are defined by their ability to hybridize under reduced stringency conditions comprising 35% formamide at a reduced temperature of 35° C.

[0259] “Hybridization” refers to the process by which a nucleic acid strand joins with a complementary strand through base pairing. Hybridization reactions can be sensitive and selective so that a particular sequence of interest can be identified even in samples in which it is present at low concentrations. Stringent conditions can be defined by, for example, the concentrations of salt or formamide in the prehybridization and hybridization solutions, or by the hybridization temperature, and are well known in the art. For example, stringency can be increased by reducing the concentration of salt, increasing the concentration of formamide, or raising the hybridization temperature, altering the time of hybridization, as described in detail, below. In alternative aspects, nucleic acids of the invention are defined by their ability to hybridize under various stringency conditions (e.g., high, medium, and low), as set forth herein.

[0260] Following hybridization, the filter may be washed with 6×SSC, 0.5% SDS at 50° C. These conditions are considered to be “moderate” conditions above 25% formamide and “low” conditions below 25% formamide. A specific example of “moderate” hybridization conditions is when the above hybridization is conducted at 30% formamide. A specific example of “low stringency” hybridization conditions is when the above hybridization is conducted at 10% formamide.

[0261] The temperature range corresponding to a particular level of stringency can be further narrowed by calculating the purine to pyrimidine ratio of the nucleic acid of interest and adjusting the temperature accordingly. Nucleic acids of the invention are also defined by their ability to hybridize under high, medium, and low stringency conditions as set forth in Ausubel and Sambrook. Variations on the above ranges and conditions are well known in the art. Hybridization conditions are discussed further, below.

[0262] The above procedure may be modified to identify nucleic acids having decreasing levels of homology to the probe sequence. For example, to obtain nucleic acids of decreasing homology to the detectable probe, less stringent conditions may be used. For example, the hybridization temperature may be decreased in increments of 5° C. from 68° C. to 42° C. in a hybridization buffer having a Nag concentration of approximately 1M. Following hybridization, the filter may be washed with 2×SSC, 0.5% SDS at the temperature of hybridization. These conditions are considered to be “moderate” conditions above 50° C. and “low” conditions below 50° C. A specific example of “moderate” hybridization conditions is when the above hybridization is conducted at 55° C. A specific example of “low stringency” hybridization conditions is when the above hybridization is conducted at 45° C.

[0263] Alternatively, the hybridization may be carried out in buffers, such as 6×SSC, containing formamide at a temperature of 42° C. In this case, the concentration of formamide in the hybridization buffer may be reduced in 5% increments from 50% to 0% to identify clones having decreasing levels of homology to the probe. Following hybridization, the filter may be washed with 6×SSC, 0.5% SDS at 50° C. These conditions are considered to be “moderate” conditions above 25% formamide and “low” conditions below 25% formamide. A specific example of “moderate” hybridization conditions is when the above hybridization is conducted at 30% formamide. A specific example of “low stringency” hybridization conditions is when the above hybridization is conducted at 10% formamide.

[0264] However, the selection of a hybridization format is not critical—it is the stringency of the wash conditions that set forth the conditions which determine whether a nucleic acid is within the scope of the invention. Wash conditions used to identify nucleic acids within the scope of the invention include, e.g.: a salt concentration of about 0.02 molar at pH 7 and a temperature of at least about 50° C. or about 55° C. to about 60° C.; or, a salt concentration of about 0.15 M NaCl at 72° C. for about 15 minutes; or, a salt concentration of about 0.2×SSC at a temperature of at least about 50° C. or about 55° C. to about 60° C. for about 15 to about 20 minutes; or, the hybridization complex is washed twice with a solution with a salt concentration of about 2×SSC containing 0.1% SDS at room temperature for 15 minutes and then washed twice by 0.1×SSC containing 0.1% SDS at 68° C. for 15 minutes; or, equivalent conditions. See Sambrook, Tijssen and Ausubel for a description of SSC buffer and equivalent conditions.

[0265] These methods may be used to isolate nucleic acids of the invention.

Oligonucleotides Probes and Methods for Using them

[0266] The invention also provides nucleic acid probes for identifying nucleic acids encoding a polypeptide with a hydrolase activity, e.g., an esterase, acylase, lipase, phospholipase or protease activity. In one aspect, the probe comprises at least 10 consecutive bases of a nucleic acid of the invention. Alternatively, a probe of the invention can be at least about 5, 6, 7, 8, 9, 10, 15, 20, 25, 30, 35, 40, 45, 50, 60, 70, 80, 90, 100, 110, 120, 130, 150, 160, 170, 180, 190, 200 or more, or about 10 to 50, about 20 to 60 about 30 to 70, consecutive bases of a sequence as set forth in a nucleic acid of the invention. The probes identify a nucleic acid by binding and/or hybridization. The probes can be used in arrays of the invention, see discussion below, including, e.g., capillary arrays. The probes of the invention can also be used to isolate other nucleic acids or polypeptides.

[0267] The probes of the invention can be used to determine whether a biological sample, such as a soil sample, contains an organism having a nucleic acid sequence of the invention (e.g., a hydrolase-encoding nucleic acid) or an organism from which the nucleic acid was obtained. In such procedures, a biological sample potentially harboring the organism from which the nucleic acid was isolated is obtained and nucleic acids are obtained from the sample. The nucleic acids are contacted with the probe under conditions which permit the probe to specifically hybridize to any complementary sequences present in the sample. Where necessary, conditions which permit the probe to specifically hybridize to complementary sequences may be determined by placing the probe in contact with complementary sequences from samples known to contain the complementary sequence, as well as control sequences which do not contain the complementary sequence. Hybridization conditions, such as the salt concentration of the hybridization buffer, the formamide concentration of the hybridization buffer, or the hybridization temperature, may be varied to identify conditions which allow the probe to hybridize specifically to complementary nucleic acids (see discussion on specific hybridization conditions).

[0268] If the sample contains the organism from which the nucleic acid was isolated, specific hybridization of the probe is then detected. Hybridization may be detected by labeling the probe with a detectable agent such as a radioactive isotope, a fluorescent dye or an enzyme capable of catalyzing the formation of a detectable product. Many methods for using the labeled probes to detect the presence of complementary nucleic acids in a sample are familiar to those skilled in the art. These include Southern Blots, Northern Blots, colony hybridization procedures, and dot blots. Protocols for each of these procedures are provided in Ausubel and Sambrook.

[0269] Alternatively, more than one probe (at least one of which is capable of specifically hybridizing to any complementary sequences which are present in the nucleic acid sample), may be used in an amplification reaction to determine whether the sample contains an organism containing a nucleic acid sequence of the invention (e.g., an organism from which the nucleic acid was isolated). In one aspect, the probes comprise oligonucleotides. In one aspect, the amplification reaction may comprise a PCR reaction. PCR protocols are described in Ausubel and Sambrook (see discussion on amplification reactions). In such procedures, the nucleic acids in the sample are contacted with the probes, the amplification reaction is performed, and any resulting amplification product is detected. The amplification product may be detected by performing gel electrophoresis on the reaction products and staining the gel with an intercalator such as ethidium bromide. Alternatively, one or more of the probes may be labeled with a radioactive isotope and the presence of a radioactive amplification product may be detected by autoradiography after gel electrophoresis.

[0270] Probes derived from sequences near the 3′ or 5′ ends of a nucleic acid sequence of the invention can also be used in chromosome walking procedures to identify clones containing additional, e.g., genomic sequences. Such methods allow the isolation of genes which encode additional proteins of interest from the host organism.

[0271] In one aspect, nucleic acid sequences of the invention are used as probes to identify and isolate related nucleic acids. In some aspects, the so-identified related nucleic acids may be cDNAs or genomic DNAs from organisms other than the one from which the nucleic acid of the invention was first isolated. In such procedures, a nucleic acid sample is contacted with the probe under conditions which permit the probe to specifically hybridize to related sequences. Hybridization of the probe to nucleic acids from the related organism is then detected using any of the methods described above.

[0272] In nucleic acid hybridization reactions, the conditions used to achieve a particular level of stringency will vary, depending on the nature of the nucleic acids being hybridized. For example, the length, degree of complementarity, nucleotide sequence composition (e.g., GC v. AT content), and nucleic acid type (e.g., RNA v. DNA) of the hybridizing regions of the nucleic acids can be considered in selecting hybridization conditions. An additional consideration is whether one of the nucleic acids is immobilized, for example, on a filter. Hybridization may be carried out under conditions of low stringency, moderate stringency or high stringency. As an example of nucleic acid hybridization, a polymer membrane containing immobilized denatured nucleic acids is first prehybridized for 30 minutes at 45° C. in a solution consisting of 0.9 M NaCl, 50 mM NaH₂PO₄, pH 7.0, 5.0 mM Na₂EDTA, 0.5% SDS, 10×Denhardt's, and 0.5 mg/ml polyriboadenylic acid. Approximately 2×107 cpm (specific activity 4−9×108 cpm/ug) of ³²P end-labeled oligonucleotide probe are then added to the solution. After 12-16 hours of incubation, the membrane is washed for 30 minutes at room temperature (RT) in 1×SET (150 mM NaCl, 20 mM Tris hydrochloride, pH 7.8, 1 mM Na₂EDTA) containing 0.5% SDS, followed by a 30 minute wash in fresh 1×SET at Tm-10° C. for the oligonucleotide probe. The membrane is then exposed to auto-radiographic film for detection of hybridization signals.

[0273] By varying the stringency of the hybridization conditions used to identify nucleic acids, such as cDNAs or genomic DNAs, which hybridize to the detectable probe, nucleic acids having different levels of homology to the probe can be identified and isolated. Stringency may be varied by conducting the hybridization at varying temperatures below the melting temperatures of the probes. The melting temperature, Tm, is the temperature (under defined ionic strength and pH) at which 50% of the target sequence hybridizes to a perfectly complementary probe. Very stringent conditions are selected to be equal to or about 5° C. lower than the Tm for a particular probe. The melting temperature of the probe may be calculated using the following exemplary formulas. For probes between 14 and 70 nucleotides in length the melting temperature (Tm) is calculated using the formula: Tₘ=81.5+16.6(log [Na+])+0.41(fraction G+C)−(600/N) where N is the length of the probe. If the hybridization is carried out in a solution containing formamide, the melting temperature may be calculated using the equation: Tₘ=81.5+16.6(log [N+])+0.41 (fraction G+C)-(0.63% formamide)-(600/N) where N is the length of the probe. Prehybridization may be carried out in 6×SSC, 5×Denhardt's reagent, 0.5% SDS, 100 μg denatured fragmented salmon sperm DNA or 6×SSC, 5×Denhardt's reagent, 0.5% SDS, 100 μg denatured fragmented salmon sperm DNA, 50% formamide. Formulas for SSC and Denhardt's and other solutions are listed, e.g., in Sambrook.

[0274] In one aspect, hybridization is conducted by adding the detectable probe to the prehybridization solutions listed above. Where the probe comprises double stranded DNA, it is denatured before addition to the hybridization solution. The filter is contacted with the hybridization solution for a sufficient period of time to allow the probe to hybridize to cDNAs or genomic DNAs containing sequences complementary thereto or homologous thereto. For probes over 200 nucleotides in length, the hybridization may be carried out at 15-25° C. below the Tm. For shorter probes, such as oligonucleotide probes, the hybridization may be conducted at 5-10° C. below the Tm. In one aspect, hybridizations in 6×SSC are conducted at approximately 68° C. In one aspect, hybridizations in 50% formamide containing solutions are conducted at approximately 42° C. All of the foregoing hybridizations would be considered to be under conditions of high stringency.

[0275] In one aspect, following hybridization, the filter is washed to remove any non-specifically bound detectable probe. The stringency used to wash the filters can also be varied depending on the nature of the nucleic acids being hybridized, the length of the nucleic acids being hybridized, the degree of complementarity, the nucleotide sequence composition (e.g., GC v. AT content), and the nucleic acid type (e.g., RNA v. DNA). Examples of progressively higher stringency condition washes are as follows: 2×SSC, 0.1% SDS at room temperature for 15 minutes (low stringency); 0.1×SSC, 0.5% SDS at room temperature for 30 minutes to 1 hour (moderate stringency); 0.1×SSC, 0.5% SDS for 15 to 30 minutes at between the hybridization temperature and 68° C. (high stringency); and 0.15M NaCl for 15 minutes at 72° C. (very high stringency). A final low stringency wash can be conducted in 0.1×SSC at room temperature. The examples above are merely illustrative of one set of conditions that can be used to wash filters. One of skill in the art would know that there are numerous recipes for different stringency washes.

[0276] Nucleic acids which have hybridized to the probe can be identified by autoradiography or other conventional techniques. The above procedure may be modified to identify nucleic acids having decreasing levels of homology to the probe sequence. For example, to obtain nucleic acids of decreasing homology to the detectable probe, less stringent conditions may be used. For example, the hybridization temperature may be decreased in increments of 5° C. from 68° C. to 42° C. in a hybridization buffer having a Na+ concentration of approximately 1M. Following hybridization, the filter may be washed with 2×SSC, 0.5% SDS at the temperature of hybridization. These conditions are considered to be “moderate” conditions above 50° C. and “low” conditions below 50° C. An example of “moderate” hybridization conditions is when the above hybridization is conducted at 55° C. An example of “low stringency” hybridization conditions is when the above hybridization is conducted at 45° C.

[0277] Alternatively, the hybridization may be carried out in buffers, such as 6×SSC, containing formamide at a temperature of 42° C. In this case, the concentration of formamide in the hybridization buffer may be reduced in 5% increments from 50% to 0% to identify clones having decreasing levels of homology to the probe. Following hybridization, the filter may be washed with 6×SSC, 0.5% SDS at 50° C. These conditions are considered to be “moderate” conditions above 25% formamide and “low” conditions below 25% formamide. A specific example of “moderate” hybridization conditions is when the above hybridization is conducted at 30% formamide. A specific example of “low stringency” hybridization conditions is when the above hybridization is conducted at 10% formamide.

[0278] These probes and methods of the invention can be used to isolate, or identify (e.g., using an array), nucleic acids having a sequence with at least about 950%, 51%, 52%, 53%, 54%, 55%, 56%, 57%, 58%, 59%, 60%, 61%, 62%, 63%, 64%, 65%, 66%, 67%, 68%, 69%, 70%, 71%, 72%, 73%, 74%, 75%, 76%, 77%, 78%, 79%, 80%, 81%, 82%, 83%, 84%, 85%, 86%, 87%, 88%, 89%, 90%, 91%, 92%, 93%, 94%, 95%, 96%, 97%, 98%, 99%, or more, sequence identity to a nucleic acid sequence of the invention comprising at least about 10, 15, 20, 25, 30, 35, 40, 50, 75, 100, 150, 200, 250, 300, 350, 400, 500, 550, 600, 650, 700, 750, 800, 850, 900, 950, 1000, or more consecutive bases thereof, and the sequences complementary thereto. Homology may be measured using an alignment algorithm, as discussed herein. For example, the homologous polynucleotides may have a coding sequence which is a naturally occurring allelic variant of one of the coding sequences described herein. Such allelic variants may have a substitution, deletion or addition of one or more nucleotides when compared to a nucleic acid of the invention.

[0279] Additionally, the probes and methods of the invention may be used to isolate, or identify (e.g., using an array), nucleic acids which encode polypeptides having at least about 50%, 51%, 52%, 53%, 54%, 55%, 56%, 57%, 58%, 59%, 60%, 61%, 62%, 63%, 64%, 65%, 66%, 67%, 68%, 69%, 70%, 71%, 72%, 73%, 74%, 75%, 76%, 77%, 78%, 79%, 80%, 81%, 82%, 83%, 84%, 85%, 86%, 87%, 88%, 89%, 90%, 91%, 92%, 93%, 94%, 95%, 96%, 97%, 98%, 99%, or more sequence identity (homology) to a polypeptide of the invention comprising at least 5, 10, 15, 20, 25, 30, 35, 40, 50, 75, 100, or 150 or more consecutive amino acids thereof as determined using a sequence alignment algorithm, e.g., such as the FASTA version 3.0t78 algorithm with the default parameters, or a BLAST 2.2.2 program with exemplary settings as set forth herein.

### Inhibiting Expression of Hydrolases

[0280] The invention further provides for nucleic acids complementary to (e.g., antisense sequences to) the nucleic acid sequences of the invention, e.g., hydrolase-encoding sequences. Antisense sequences are capable of inhibiting the transport, splicing or transcription of hydrolase-encoding genes. The inhibition can be effected through the targeting of genomic DNA or messenger RNA. The inhibition can be effected using DNA, e.g., an inhibitory ribozyme, or an RNA, e.g., a double-stranded iRNA, such as an miRNA or siRNA, comprising a sequence of the invention (which include both antisense, or complementary strands, and sense strands). The transcription or function of targeted nucleic acid can be inhibited, for example, by hybridization and/or cleavage. The invention provides a set of inhibitors comprising oligonucleotides capable of binding hydrolase gene and/or message, in either case preventing or inhibiting the production or function of hydrolase. The association can be through sequence specific hybridization. Another useful class of inhibitors includes oligonucleotides which cause inactivation or cleavage of hydrolase message. The oligonucleotide can have enzyme activity which causes such cleavage, such as ribozymes. The oligonucleotide can be chemically modified or conjugated to an enzyme or composition capable of cleaving the complementary nucleic acid. One may screen a pool of many different such oligonucleotides for those with the desired activity.

### Antisense Oligonucleotides

[0281] The invention provides antisense oligonucleotides capable of binding hydrolase message which can inhibit hydrolase activity by targeting mRNA or genomic DNA. Strategies for designing antisense oligonucleotides are well described in the scientific and patent literature, and the skilled artisan can design such hydrolase oligonucleotides using the novel reagents of the invention. For example, gene walking/RNA mapping protocols to screen for effective antisense oligonucleotides are well known in the art, see, e.g., Ho (2000) Methods Enzymol. 314:168-183, describing an RNA mapping assay, which is based on standard molecular techniques to provide an easy and reliable method for potent antisense sequence selection. See also Smith (2000) Eur. J. Pharm. Sci. 11: 191-198.

[0282] In one aspect, recombinantly generated, or, isolated naturally occurring nucleic acids are used as antisense oligonucleotides. The antisense oligonucleotides can be of any length; for example, in alternative aspects, the antisense oligonucleotides are between about 5 to 100, about 10 to 80, about 15 to 60, about 18 to 40. The antisense oligonucleotides can be single stranded or double-stranded RNA or DNA. The optimal length can be determined by routine screening. The antisense oligonucleotides can be present at any concentration. The optimal concentration can be determined by routine screening. A wide variety of synthetic, non-naturally occurring nucleotide and nucleic acid analogues are known which can address this potential problem. For example, peptide nucleic acids (PNAs) containing non-ionic backbones, such as N-(2-aminoethyl) glycine units can be used. Antisense oligonucleotides having phosphorothioate linkages can also be used, as described in WO 97/03211; WO 96/39154; Mata (1997) Toxicol Appl Pharmacol 144:189-197; Antisense Therapeutics, ed. Agrawal (Humana Press, Totowa, N.J., 1996). Antisense oligonucleotides having synthetic DNA backbone analogues provided by the invention can also include phosphoro-dithioate, methylphosphonate, phosphoramidate, alkyl phosphotriester, sulfamate, 3′-thioacetal, methylene(methylimino), 3′-N-carbamate, and morpholino carbamate nucleic acids, as described above.

[0283] Combinatorial chemistry methodology can be used to create vast numbers of oligonucleotides that can be rapidly screened for specific oligonucleotides that have appropriate binding affinities and specificities toward any target, such as the sense and antisense hydrolase sequences of the invention (see, e.g., Gold (1995) J. of Biol. Chem. 270:13581-13584).

[0284] Inhibitory Ribozymes

[0285] The invention provides for with ribozymes capable of binding hydrolase message that can inhibit hydrolase activity by targeting mRNA. Strategies for designing ribozymes and selecting the hydrolase-specific antisense sequence for targeting are well described in the scientific and patent literature, and the skilled artisan can design such ribozymes using the novel reagents of the invention. Ribozymes act by binding to a target RNA through the target RNA binding portion of a ribozyme which is held in close proximity to an enzymatic portion of the RNA that cleaves the target RNA. Thus, the ribozyme recognizes and binds a target RNA through complementary basepairing, and once bound to the correct site, acts enzymatically to cleave and inactivate the target RNA. Cleavage of a target RNA in such a manner will destroy its ability to direct synthesis of an encoded protein if the cleavage occurs in the coding sequence. After a ribozyme has bound and cleaved its RNA target, it is typically released from that RNA and so can bind and cleave new targets repeatedly.

[0286] In some circumstances, the enzymatic nature of a ribozyme can be advantageous over other technologies, such as antisense technology (where a nucleic acid molecule simply binds to a nucleic acid target to block its transcription, translation or association with another molecule) as the effective concentration of ribozyme necessary to effect a therapeutic treatment can be lower than that of an antisense oligonucleotide. This potential advantage reflects the ability of the ribozyme to act enzymatically. Thus, a single ribozyme molecule is able to cleave many molecules of target RNA. In addition, a ribozyme is typically a highly specific inhibitor, with the specificity of inhibition depending not only on the base pairing mechanism of binding, but also on the mechanism by which the molecule inhibits the expression of the RNA to which it binds. That is, the inhibition is caused by cleavage of the RNA target and so specificity is defined as the ratio of the rate of cleavage of the targeted RNA over the rate of cleavage of non-targeted RNA. This cleavage mechanism is dependent upon factors additional to those involved in base pairing. Thus, the specificity of action of a ribozyme can be greater than that of antisense oligonucleotide binding the same RNA site.

[0287] The enzymatic ribozyme RNA molecule can be formed in a hammerhead motif, but may also be formed in the motif of a hairpin, hepatitis delta virus, group I intron or RnaseP-like RNA (in association with an RNA guide sequence). Examples of such hammerhead motifs are described by Rossi (1992) Aids Research and Human Retroviruses 8:183; hairpin motifs by Hampel (1989) Biochemistry 28:4929, and Hampel (1990) Nuc. Acids Res. 18:299; the hepatitis delta virus motif by Perrotta (1992) Biochemistry 31:16; the RNaseP motif by Guerrier-Takada (1983) Cell 35:849; and the group I intron by Cech U.S. Pat. No. 4,987,071. The recitation of these specific motifs is not intended to be limiting; those skilled in the art will recognize that an enzymatic RNA molecule of this invention has a specific substrate binding site complementary to one or more of the target gene RNA regions, and has nucleotide sequence within or surrounding that substrate binding site which imparts an RNA cleaving activity to the molecule.

[0288] RNA Interference (RNAi)

[0289] In one aspect, the invention provides an RNA inhibitory molecule, a so-called “RNAi” molecule, comprising a hydrolase sequence of the invention. The RNAi molecule comprises a double-stranded RNA (dsRNA) molecule. The RNAi can inhibit expression of a hydrolase gene. In one aspect, the RNAi is about 15, 16, 17, 18, 19, 20, 21, 22, 23, 24, 25 or more duplex nucleotides in length. While the invention is not limited by any particular mechanism of action, the RNAi can enter a cell and cause the degradation of a single-stranded RNA (ssRNA) of similar or identical sequences, including endogenous mRNAs. When a cell is exposed to double-stranded RNA (dsRNA), mRNA from the homologous gene is selectively degraded by a process called RNA interference (RNAi). While the invention is not limited by any particular mechanism of action, in one aspect, a basic mechanism behind RNAi, e.g., siRNA for inhibiting transcription and/or miRNA to inhibit translation, is the breaking of a double-stranded RNA (dsRNA) matching a specific gene sequence into short pieces called short interfering RNA, which trigger the degradation of mRNA that matches its sequence. In one aspect, the RNAi's of the invention are used in gene-silencing therapeutics, see, e.g., Shuey (2002) Drug Discov. Today 7:1040-1046. In one aspect, the invention provides methods to selectively degrade RNA using the RNAi's of the invention. The process may be practiced in vitro, ex vivo or in vivo. In one aspect, the RNAi molecules of the invention can be used to generate a loss-of-function mutation in a cell, an organ or an animal. Methods for making and using RNAi molecules for selectively degrade RNA are well known in the art, see, e.g., U.S. Pat. Nos. 6,506,559; 6,511,824; 6,515,109; 6,489,127.

### Modification of Nucleic Acids

[0290] The invention provides methods of generating variants of the nucleic acids of the invention, e.g., those encoding a hydrolase or an antibody of the invention. These methods can be repeated or used in various combinations to generate hydrolases or antibodies having an altered or different activity or an altered or different stability from that of a hydrolase or antibody encoded by the template nucleic acid. These methods also can be repeated or used in various combinations, e.g., to generate variations in gene/message expression, message translation or message stability. In another aspect, the genetic composition of a cell is altered by, e.g., modification of a homologous gene ex vivo, followed by its reinsertion into the cell.

[0291] A hydrolase variant (e.g., “lipase variant”, “esterase variant”, “protease variant” “phospholipase variant”) can have an amino acid sequence which is derived from the amino acid sequence of a “precursor”. The precursor can include naturally-occurring hydrolase and/or a recombinant hydrolase. The amino acid sequence of the hydrolase variant is “derived” from the precursor hydrolase amino acid sequence by the substitution, deletion or insertion of one or more amino acids of the precursor amino acid sequence. Such modification is of the “precursor DNA sequence” which encodes the amino acid sequence of the precursor lipase rather than manipulation of the precursor hydrolase enzyme per se. Suitable methods for such manipulation of the precursor DNA sequence include methods disclosed herein, as well as methods known to those skilled in the art.

[0292] The term “variant” can include polynucleotides or polypeptides of the invention modified at one or more base pairs, codons, introns, exons, or amino acid residues (respectively) yet still retain the biological activity of a hydrolase of the invention.

[0293] Variants can be produced by any number of means included methods such as, for example, error-prone PCR, shuffling, oligonucleotide-directed mutagenesis, assembly PCR, sexual PCR mutagenesis, in vivo mutagenesis, cassette mutagenesis, recursive ensemble mutagenesis, exponential ensemble mutagenesis, site-specific mutagenesis, gene reassembly, GSSM and any combination thereof. Techniques for producing variant hydrolases having activity at a pH or temperature, for example, that is different from a wild-type hydrolase, are included herein.

[0294] The term “saturation mutagenesis” or “GSSM” includes a method that uses degenerate oligonucleotide primers to introduce point mutations into a polynucleotide, as described in detail, below. The term “optimized directed evolution system” or “optimized directed evolution” includes a method for reassembling fragments of related nucleic acid sequences, e.g., related genes, and explained in detail, below. The term “synthetic ligation reassembly” or “SLR” includes a method of ligating oligonucleotide fragments in a non-stochastic fashion, and explained in detail, below.

[0295] A nucleic acid of the invention can be altered by any means. For example, random or stochastic methods, or, non-stochastic, or “directed evolution,” methods, see, e.g., U.S. Pat. No. 6,361,974. Methods for random mutation of genes are well known in the art, see, e.g., U.S. Pat. No. 5,830,696. For example, mutagens can be used to randomly mutate a gene. Mutagens include, e.g., ultraviolet light or gamma irradiation, or a chemical mutagen, e.g., mitomycin, nitrous acid, photoactivated psoralens, alone or in combination, to induce DNA breaks amenable to repair by recombination. Other chemical mutagens include, for example, sodium bisulfite, nitrous acid, hydroxylamine, hydrazine or formic acid. Other mutagens are analogues of nucleotide precursors, e.g., nitrosoguanidine, 5-bromouracil, 2-aminopurine, or acridine. These agents can be added to a PCR reaction in place of the nucleotide precursor thereby mutating the sequence. Intercalating agents such as proflavine, acriflavine, quinacrine and the like can also be used.

[0296] In one aspect, a metagenomic discovery and a non-stochastic method of directed evolution (called “DIRECTEVOLUTION®, as described, e.g., in U.S. Pat. No. 6,939,689, which includes Gene Site Saturation Mutagenesis (GSSM) (as discussed above, see also U.S. Pat. Nos. 6,171,820 and 6,579,258) and Tunable GeneReassembly (TGR) (see, e.g., U.S. Pat. No. 6,537,776) technology is used to practice the invention, e.g., for the discovery and/or optimization of lyases of the invention.

[0297] Any technique in molecular biology can be used, e.g., random PCR mutagenesis, see, e.g., Rice (1992) Proc. Natl. Acad. Sci. USA 89:5467-5471; or, combinatorial multiple cassette mutagenesis, see, e.g., Crameri (1995) Biotechniques 18:194-196. Alternatively, nucleic acids, e.g., genes, can be reassembled after random, or “stochastic,” fragmentation, see, e.g., U.S. Pat. Nos. 6,291,242; 6,287,862; 6,287,861; 5,955,358; 5,830,721; 5,824,514; 5,811,238; 5,605,793. In alternative aspects, modifications, additions or deletions are introduced by error-prone PCR, shuffling, oligonucleotide-directed mutagenesis, assembly PCR, sexual PCR mutagenesis, in vivo mutagenesis, cassette mutagenesis, recursive ensemble mutagenesis, exponential ensemble mutagenesis, site-specific mutagenesis, gene reassembly, gene site saturated mutagenesis (GSSM), synthetic ligation reassembly (SLR), recombination, recursive sequence recombination, phosphothioate-modified DNA mutagenesis, uracil-containing template mutagenesis, gapped duplex mutagenesis, point mismatch repair mutagenesis, repair-deficient host strain mutagenesis, chemical mutagenesis, radiogenic mutagenesis, deletion mutagenesis, restriction-selection mutagenesis, restriction-purification mutagenesis, artificial gene synthesis, ensemble mutagenesis, chimeric nucleic acid multimer creation, and/or a combination of these and other methods.

[0298] The following publications describe a variety of recursive recombination procedures and/or methods which can be incorporated into the methods of the invention: Stemmer (1999) “Molecular breeding of viruses for targeting and other clinical properties” Tumor Targeting 4:1-4; Ness (1999) Nature Biotechnology 17:893-896; Chang (1999) “Evolution of a cytokine using DNA family shuffling” Nature Biotechnology 17:793-797; Minshull (1999) “Protein evolution by molecular breeding” Current Opinion in Chemical Biology 3:284-290; Christians (1999) “Directed evolution of thymidine kinase for AZT phosphorylation using DNA family shuffling” Nature Biotechnology 17:259-264; Crameri (1998) “DNA shuffling of a family of genes from diverse species accelerates directed evolution” Nature 391:288-291; Crameri (1997) “Molecular evolution of an arsenate detoxification pathway by DNA shuffling,” Nature Biotechnology 15:436-438; Zhang (1997) “Directed evolution of an effective fucosidase from a galactosidase by DNA shuffling and screening” Proc. Natl. Acad. Sci. USA 94:4504-4509; Patten et al. (1997) “Applications of DNA Shuffling to Pharmaceuticals and Vaccines” Current Opinion in Biotechnology 8:724-733; Crameri et al. (1996) “Construction and evolution of antibody-phage libraries by DNA shuffling” Nature Medicine 2:100-103; Gates et al. (1996) “Affinity selective isolation of ligands from peptide libraries through display on a lac repressor headpiece dimer” Journal of Molecular Biology 255:373-386; Stemmer (1996) “Sexual PCR and Assembly PCR” In: The Encyclopedia of Molecular Biology. VCH Publishers, New York. pp. 447-457; Crameri and Stemmer (1995) “Combinatorial multiple cassette mutagenesis creates all the permutations of mutant and wildtype cassettes” BioTechniques 18:194-195; Stemmer et al. (1995) “Single-step assembly of a gene and entire plasmid form large numbers of oligodeoxyribonucleotides” Gene, 164:49-53; Stemmer (1995) “The Evolution of Molecular Computation” Science 270: 1510; Stemmer (1995) “Searching Sequence Space” Bio/Technology 13:549-553; Stemmer (1994) “Rapid evolution of a protein in vitro by DNA shuffling” Nature 370:389-391; and Stemmer (1994) “DNA shuffling by random fragmentation and reassembly: In vitro recombination for molecular evolution.” Proc. Natl. Acad. Sci. USA 91:10747-10751.

[0299] Mutational methods of generating diversity include, for example, site-directed mutagenesis (Ling et al. (1997) “Approaches to DNA mutagenesis: an overview” Anal Biochem. 254(2): 157-178; Dale et al. (1996) “Oligonucleotide-directed random mutagenesis using the phosphorothioate method” Methods Mol. Biol. 57:369-374; Smith (1985) “In vitro mutagenesis” Ann. Rev. Genet. 19:423-462; Botstein & Shortle (1985) “Strategies and applications of in vitro mutagenesis” Science 229:1193-1201; Carter (1986) “Site-directed mutagenesis” Biochem. J. 237:1-7; and Kunkel (1987) “The efficiency of oligonucleotide directed mutagenesis” in Nucleic Acids & Molecular Biology (Eckstein, F. and Lilley, D. M. J. eds., Springer Verlag, Berlin)); mutagenesis using uracil containing templates (Kunkel (1985) “Rapid and efficient site-specific mutagenesis without phenotypic selection” Proc. Natl. Acad. Sci. USA 82:488-492; Kunkel et al. (1987) “Rapid and efficient site-specific mutagenesis without phenotypic selection” Methods in Enzymol. 154, 367-382; and Bass et al. (1988) “Mutant Trp repressors with new DNA-binding specificities” Science 242:240-245); oligonucleotide-directed mutagenesis (Methods in Enzymol. 100: 468-500 (1983); Methods in Enzymol. 154: 329-350 (1987); Zoller & Smith (1982) “Oligonucleotide-directed mutagenesis using M13-derived vectors: an efficient and general procedure for the production of point mutations in any DNA fragment” Nucleic Acids Res. 10:6487-6500; Zoller & Smith (1983) “Oligonucleotide-directed mutagenesis of DNA fragments cloned into M 13 vectors” Methods in Enzymol. 100:468-500; and Zoller & Smith (1987) Oligonucleotide-directed mutagenesis: a simple method using two oligonucleotide primers and a single-stranded DNA template” Methods in Enzymol. 154:329-350); phosphorothioate-modified DNA mutagenesis (Taylor et al. (1985) “The use of phosphorothioate-modified DNA in restriction enzyme reactions to prepare nicked DNA” Nucl. Acids Res. 13: 8749-8764; Taylor et al. (1985) “The rapid generation of oligonucleotide-directed mutations at high frequency using phosphorothioate-modified DNA” Nucl. Acids Res. 13: 8765-8787 (1985); Nakamaye (1986) “Inhibition of restriction endonuclease Nci I cleavage by phosphorothioate groups and its application to oligonucleotide-directed mutagenesis” Nucl. Acids Res. 14: 9679-9698; Sayers et al. (1988) “Y-T Exonucleases in phosphorothioate-based oligonucleotide-directed mutagenesis” Nucl. Acids Res. 16:791-802; and Sayers et al. (1988) “Strand specific cleavage of phosphorothioate-containing DNA by reaction with restriction endonucleases in the presence of ethidium bromide” Nucl. Acids Res. 16: 803-814); mutagenesis using gapped duplex DNA (Kramer et al. (1984) “The gapped duplex DNA approach to oligonucleotide-directed mutation construction” Nucl. Acids Res. 12: 9441-9456; Kramer & Fritz (1987) Methods in Enzymol. “Oligonucleotide-directed construction of mutations via gapped duplex DNA” 154:350-367; Kramer et al. (1988) “Improved enzymatic in vitro reactions in the gapped duplex DNA approach to oligonucleotide-directed construction of mutations” Nucl. Acids Res. 16: 7207; and Fritz et al. (1988) “Oligonucleotide-directed construction of mutations: a gapped duplex DNA procedure without enzymatic reactions in vitro” Nucl. Acids Res. 16: 6987-6999).

[0300] Additional protocols used in the methods of the invention include point mismatch repair (Kramer (1984) “Point Mismatch Repair” Cell 38:879-887), mutagenesis using repair-deficient host strains (Carter et al. (1985) “Improved oligonucleotide site-directed mutagenesis using M113 vectors” Nucl. Acids Res. 13: 4431-4443; and Carter (1987) “Improved oligonucleotide-directed mutagenesis using M13 vectors” Methods in Enzymol. 154: 382-403), deletion mutagenesis (Eghtedarzadeh (1986) “Use of oligonucleotides to generate large deletions” Nucl. Acids Res. 14: 5115), restriction-selection and restriction-selection and restriction-purification (Wells et al. (1986) “Importance of hydrogen-bond formation in stabilizing the transition state of subtilisin” Phil. Trans. R. Soc. Lond. A 317: 415-423), mutagenesis by total gene synthesis (Nambiar et al. (1984) “Total synthesis and cloning of a gene coding for the ribonuclease S protein” Science 223: 1299-1301; Sakamar and Khorana (1988) “Total synthesis and expression of a gene for the a-subunit of bovine rod outer segment guanine nucleotide-binding protein (transducin)” Nucl. Acids Res. 14: 6361-6372; Wells et al. (1985) “Cassette mutagenesis: an efficient method for generation of multiple mutations at defined sites” Gene 34:315-323; and Grundstrom et al. (1985) “Oligonucleotide-directed mutagenesis by microscale ‘shot-gun’ gene synthesis” Nucl. Acids Res. 13: 3305-3316), double-strand break repair (Mandecki (1986); Arnold (1993) “Protein engineering for unusual environments” Current Opinion in Biotechnology 4:450-455. “Oligonucleotide-directed double-strand break repair in plasmids of Escherichia coli: a method for site-specific mutagenesis” Proc. Natl. Acad. Sci. USA, 83:7177-7181). Additional details on many of the above methods can be found in Methods in Enzymology Volume 154, which also describes useful controls for trouble-shooting problems with various mutagenesis methods.

[0301] Additional protocols used in the methods of the invention include those discussed in U.S. Pat. No. 5,605,793 to Stemmer (Feb. 25, 1997), “Methods for In Vitro Recombination;” U.S. Pat. No. 5,811,238 to Stemmer et al. (Sep. 22, 1998) “Methods for Generating Polynucleotides having Desired Characteristics by Iterative Selection and Recombination;” U.S. Pat. No. 5,830,721 to Stemmer et al. (Nov. 3, 1998), “DNA Mutagenesis by Random Fragmentation and Reassembly;” U.S. Pat. No. 5,834,252 to Stemmer, et al. (Nov. 10, 1998) “End-Complementary Polymerase Reaction;” U.S. Pat. No. 5,837,458 to Minshull, et al. (Nov. 17, 1998), “Methods and Compositions for Cellular and Metabolic Engineering;” WO 95/22625, Stemmer and Crameri, “Mutagenesis by Random Fragmentation and Reassembly;” WO 96/33207 by Stemmer and Lipschutz “End Complementary Polymerase Chain Reaction;” WO 97/20078 by Stemmer and Crameri “Methods for Generating Polynucleotides having Desired Characteristics by Iterative Selection and Recombination;” WO 97/35966 by Minshull and Stemmer, “Methods and Compositions for Cellular and Metabolic Engineering;” WO 99/41402 by Punnonen et al. “Targeting of Genetic Vaccine Vectors;” WO 99/41383 by Punnonen et al. “Antigen Library Immunization;” WO 99/41369 by Punnonen et al. “Genetic Vaccine Vector Engineering;” WO 99/41368 by Punnonen et al. “Optimization of Immunomodulatory Properties of Genetic Vaccines;” EP 752008 by Stemmer and Crameri, “DNA Mutagenesis by Random Fragmentation and Reassembly;” EP 0932670 by Stemmer “Evolving Cellular DNA Uptake by Recursive Sequence Recombination;” WO 99/23107 by Stemmer et al., “Modification of Virus Tropism and Host Range by Viral Genome Shuffling;” WO 99/21979 by Apt et al., “Human Papillomavirus Vectors;” WO 98/31837 by del Cardayre et al. “Evolution of Whole Cells and Organisms by Recursive Sequence Recombination;” WO 98/27230 by Patten and Stemmer, “Methods and Compositions for Polypeptide Engineering;” WO 98/27230 by Stemmer et al., “Methods for Optimization of Gene Therapy by Recursive Sequence Shuffling and Selection,” WO 00/00632, “Methods for Generating Highly Diverse Libraries,” WO 00/09679, “Methods for Obtaining in Vitro Recombined Polynucleotide Sequence Banks and Resulting Sequences,” WO 98/42832 by Arnold et al., “Recombination of Polynucleotide Sequences Using Random or Defined Primers,” WO 99/29902 by Arnold et al., “Method for Creating Polynucleotide and Polypeptide Sequences,” WO 98/41653 by Vind, “An in Vitro Method for Construction of a DNA Library,” WO 98/41622 by Borchert et al., “Method for Constructing a Library Using DNA Shuffling,” and WO 98/42727 by Pati and Zarling, “Sequence Alterations using Homologous Recombination.”

[0302] Protocols that can be used to practice the invention (providing details regarding various diversity generating methods) are described, e.g., in U.S. patent application Ser. No. 09/407,800, “SHUFFLING OF CODON ALTERED GENES” by Patten et al. filed Sep. 28, 1999; “EVOLUTION OF WHOLE CELLS AND ORGANISMS BY RECURSIVE SEQUENCE RECOMBINATION” by del Cardayre et al., U.S. Pat. No. 6,379,964; “OLIGONUCLEOTIDE MEDIATED NUCLEIC ACID RECOMBINATION” by Crameri et al., U.S. Pat. Nos. 6,319,714; 6,368,861; 6,376,246; 6,423,542; 6,426,224 and PCT/US00/01203; “USE OF CODON-VARIED OLIGONUCLEOTIDE SYNTHESIS FOR SYNTHETIC SHUFFLING” by Welch et al., U.S. Pat. No. 6,436,675; “METHODS FOR MAKING CHARACTER STRINGS, POLYNUCLEOTIDES & POLYPEPTIDES HAVING DESIRED CHARACTERISTICS” by Selifonov et al., filed Jan. 18, 2000, (PCT/US00/01202) and, e.g. “METHODS FOR MAKING CHARACTER STRINGS, POLYNUCLEOTIDES & POLYPEPTIDES HAVING DESIRED CHARACTERISTICS” by Selifonov et al., filed Jul. 18, 2000 (U.S. Ser. No. 09/618,579); “METHODS OF POPULATING DATA STRUCTURES FOR USE IN EVOLUTIONARY SIMULATIONS” by Selifonov and Stemmer, filed Jan. 18, 2000 (PCT/US00/01138); and “SINGLE-STRANDED NUCLEIC ACID TEMPLATE-MEDIATED RECOMBINATION AND NUCLEIC ACID FRAGMENT ISOLATION” by Affholter, filed Sep. 6, 2000 (U.S. Ser. No. 09/656,549); and U.S. Pat. Nos. 6,177,263; 6,153,410.

[0303] Non-stochastic, or “directed evolution,” methods include, e.g., saturation mutagenesis (GSSM), synthetic ligation reassembly (SLR), or a combination thereof are used to modify the nucleic acids of the invention to generate hydrolases with new or altered properties (e.g., activity under highly acidic or alkaline conditions, high temperatures, and the like). Polypeptides encoded by the modified nucleic acids can be screened for an activity before testing for proteolytic or other activity. Any testing modality or protocol can be used, e.g., using a capillary array platform. See, e.g., U.S. Pat. Nos. 6,361,974; 6,280,926; 5,939,250.

[0304] Gene Site Saturation Mutagenesis, or, GSSM

[0305] The invention also provides methods for making enzyme using Gene Site Saturation mutagenesis, or, GSSM, as described herein, and also in U.S. Pat. Nos. 6,171,820 and 6,579,258.

[0306] In one aspect of the invention, non-stochastic gene modification, a “directed evolution process,” is used to generate hydrolases and antibodies with new or altered properties. Variations of this method have been termed “gene site-saturation mutagenesis,” “site-saturation mutagenesis,” “saturation mutagenesis” or simply “GSSM.” Methods of the invention can be used in combination with other mutagenization processes, e.g., as described in U.S. Pat. Nos. 6,171,820; 6,238,884. In one aspect, GSSM comprises providing a template polynucleotide and a plurality of oligonucleotides, wherein each oligonucleotide comprises a sequence homologous to the template polynucleotide, thereby targeting a specific sequence of the template polynucleotide, and a sequence that is a variant of the homologous gene; generating progeny polynucleotides comprising non-stochastic sequence variations by replicating the template polynucleotide with the oligonucleotides, thereby generating polynucleotides comprising homologous gene sequence variations.

[0307] In one aspect, codon primers containing a degenerate N,N,G/T sequence are used to introduce point mutations into a polynucleotide, so as to generate a set of progeny polypeptides in which a full range of single amino acid substitutions is represented at each amino acid position, e.g., an amino acid residue in an enzyme active site or ligand binding site targeted to be modified. These oligonucleotides can comprise a contiguous first homologous sequence, a degenerate N,N,G/T sequence, and, optionally, a second homologous sequence. The downstream progeny translational products from the use of such oligonucleotides include all possible amino acid changes at each amino acid site along the polypeptide, because the degeneracy of the N,N,G/T sequence includes codons for all 20 amino acids. In one aspect, one such degenerate oligonucleotide (comprised of, e.g., one degenerate N,N,G/T cassette) is used for subjecting each original codon in a parental polynucleotide template to a full range of codon substitutions. In another aspect, at least two degenerate cassettes are used—either in the same oligonucleotide or not, for subjecting at least two original codons in a parental polynucleotide template to a full range of codon substitutions. For example, more than one N,N,G/T sequence can be contained in one oligonucleotide to introduce amino acid mutations at more than one site. This plurality of N,N,G/T sequences can be directly contiguous, or separated by one or more additional nucleotide sequence(s). In another aspect, oligonucleotides serviceable for introducing additions and deletions can be used either alone or in combination with the codons containing an N,N,G/T sequence, to introduce any combination or permutation of amino acid additions, deletions, and/or substitutions.

[0308] In one aspect, simultaneous mutagenesis of two or more contiguous amino acid positions is done using an oligonucleotide that contains contiguous N,N,G/T triplets, i.e. a degenerate (N,N,G/T)ₙ sequence. In another aspect, degenerate cassettes having less degeneracy than the N,N,G/T sequence are used. For example, it may be desirable in some instances to use (e.g. in an oligonucleotide) a degenerate triplet sequence comprised of only one N, where said N can be in the first second or third position of the triplet. Any other bases including any combinations and permutations thereof can be used in the remaining two positions of the triplet. Alternatively, it may be desirable in some instances to use (e.g. in an oligo) a degenerate N,N,N triplet sequence.

[0309] In one aspect, use of degenerate triplets (e.g., N,N,G/T triplets) allows for systematic and easy generation of a full range of possible natural amino acids (for a total of 20 amino acids) into each and every amino acid position in a polypeptide (in alternative aspects, the methods also include generation of less than all possible substitutions per amino acid residue, or codon, position). For example, for a 100 amino acid polypeptide, 2000 distinct species (i.e. 20 possible amino acids per position X 100 amino acid positions) can be generated. Through the use of an oligonucleotide or set of oligonucleotides containing a degenerate N,N,G/T triplet, 32 individual sequences can code for all 20 possible natural amino acids. Thus, in a reaction vessel in which a parental polynucleotide sequence is subjected to saturation mutagenesis using at least one such oligonucleotide, there are generated 32 distinct progeny polynucleotides encoding distinct polypeptides. In contrast, the use of a non-degenerate oligonucleotide in site-directed mutagenesis leads to only one progeny polypeptide product per reaction vessel. Nondegenerate oligonucleotides can optionally be used in combination with degenerate primers disclosed; for example, nondegenerate oligonucleotides can be used to generate specific point mutations in a working polynucleotide. This provides one means to generate specific silent point mutations, point mutations leading to corresponding amino acid changes, and point mutations that cause the generation of stop codons and the corresponding expression of polypeptide fragments.

[0310] In one aspect, each saturation mutagenesis reaction vessel contains polynucleotides encoding at least 20 progeny polypeptide (e.g., hydrolases, e.g., esterases, acylases, lipases, phospholipases or proteases) molecules such that all 20 natural amino acids are represented at the one specific amino acid position corresponding to the codon position mutagenized in the parental polynucleotide (other aspects use less than all 20 natural combinations). The 32-fold degenerate progeny polypeptides generated from each saturation mutagenesis reaction vessel can be subjected to clonal amplification (e.g. cloned into a suitable host, e.g., E. coli host, using, e.g., an expression vector) and subjected to expression screening. When an individual progeny polypeptide is identified by screening to display a favorable change in property (when compared to the parental polypeptide, such as increased proteolytic activity under alkaline or acidic conditions), it can be sequenced to identify the correspondingly favorable amino acid substitution contained therein.

[0311] In one aspect, upon mutagenizing each and every amino acid position in a parental polypeptide using saturation mutagenesis as disclosed herein, favorable amino acid changes may be identified at more than one amino acid position. One or more new progeny molecules can be generated that contain a combination of all or part of these favorable amino acid substitutions. For example, if 2 specific favorable amino acid changes are identified in each of 3 amino acid positions in a polypeptide, the permutations include 3 possibilities at each position (no change from the original amino acid, and each of two favorable changes) and 3 positions. Thus, there are 3×3×3 or 27 total possibilities, including 7 that were previously examined −6 single point mutations (i.e. 2 at each of three positions) and no change at any position.

[0312] In another aspect, site-saturation mutagenesis can be used together with another stochastic or non-stochastic means to vary sequence, e.g., synthetic ligation reassembly (see below), shuffling, chimerization, recombination and other mutagenizing processes and mutagenizing agents. This invention provides for the use of any mutagenizing process(es), including saturation mutagenesis, in an iterative manner.

[0313] Synthetic Ligation Reassembly (SLR)

[0314] The invention provides a non-stochastic gene modification system termed “synthetic ligation reassembly,” or simply “SLR,” a “directed evolution process,” to generate polypeptides, e.g., a polypeptide, enzyme, protein, e.g. structural or binding protein, or antibodies of the invention, with new or altered properties. SLR is a method of ligating oligonucleotide fragments together non-stochastically. This method differs from stochastic oligonucleotide shuffling in that the nucleic acid building blocks are not shuffled, concatenated or chimerized randomly, but rather are assembled non-stochastically. See, e.g., U.S. Pat. Nos. 6,773,900; 6,740,506; 6,713,282; 6,635,449; 6,605,449; 6,537,776.

[0315] In one aspect, SLR comprises the following steps: (a) providing a template polynucleotide, wherein the template polynucleotide comprises sequence encoding a homologous gene; (b) providing a plurality of building block polynucleotides, wherein the building block polynucleotides are designed to cross-over reassemble with the template polynucleotide at a predetermined sequence, and a building block polynucleotide comprises a sequence that is a variant of the homologous gene and a sequence homologous to the template polynucleotide flanking the variant sequence; (c) combining a building block polynucleotide with a template polynucleotide such that the building block polynucleotide cross-over reassembles with the template polynucleotide to generate polynucleotides comprising homologous gene sequence variations.

[0316] SLR does not depend on the presence of high levels of homology between polynucleotides to be rearranged. Thus, this method can be used to non-stochastically generate libraries (or sets) of progeny molecules comprised of over 10¹⁰⁰ different chimeras. SLR can be used to generate libraries comprised of over 10¹⁰⁰⁰ different progeny chimeras. Thus, aspects of the present invention include non-stochastic methods of producing a set of finalized chimeric nucleic acid molecule shaving an overall assembly order that is chosen by design. This method includes the steps of generating by design a plurality of specific nucleic acid building blocks having serviceable mutually compatible ligatable ends, and assembling these nucleic acid building blocks, such that a designed overall assembly order is achieved.

[0317] The mutually compatible ligatable ends of the nucleic acid building blocks to be assembled are considered to be “serviceable” for this type of ordered assembly if they enable the building blocks to be coupled in predetermined orders. Thus, the overall assembly order in which the nucleic acid building blocks can be coupled is specified by the design of the ligatable ends. If more than one assembly step is to be used, then the overall assembly order in which the nucleic acid building blocks can be coupled is also specified by the sequential order of the assembly step(s). In one aspect, the annealed building pieces are treated with an enzyme, such as a ligase (e.g. T4 DNA ligase), to achieve covalent bonding of the building pieces.

[0318] In one aspect, the design of the oligonucleotide building blocks is obtained by analyzing a set of progenitor nucleic acid sequence templates that serve as a basis for producing a progeny set of finalized chimeric polynucleotides. These parental oligonucleotide templates thus serve as a source of sequence information that aids in the design of the nucleic acid building blocks that are to be mutagenized, e.g., chimerized or shuffled. In one aspect of this method, the sequences of a plurality of parental nucleic acid templates are aligned in order to select one or more demarcation points. The demarcation points can be located at an area of homology, and are comprised of one or more nucleotides. These demarcation points are preferably shared by at least two of the progenitor templates. The demarcation points can thereby be used to delineate the boundaries of oligonucleotide building blocks to be generated in order to rearrange the parental polynucleotides. The demarcation points identified and selected in the progenitor molecules serve as potential chimerization points in the assembly of the final chimeric progeny molecules. A demarcation point can be an area of homology (comprised of at least one homologous nucleotide base) shared by at least two parental polynucleotide sequences. Alternatively, a demarcation point can be an area of homology that is shared by at least half of the parental polynucleotide sequences, or, it can be an area of homology that is shared by at least two thirds of the parental polynucleotide sequences. Even more preferably a serviceable demarcation points is an area of homology that is shared by at least three fourths of the parental polynucleotide sequences, or, it can be shared by at almost all of the parental polynucleotide sequences. In one aspect, a demarcation point is an area of homology that is shared by all of the parental polynucleotide sequences.

[0319] In one aspect, a ligation reassembly process is performed exhaustively in order to generate an exhaustive library of progeny chimeric polynucleotides. In other words, all possible ordered combinations of the nucleic acid building blocks are represented in the set of finalized chimeric nucleic acid molecules. At the same time, in another aspect, the assembly order (i.e. the order of assembly of each building block in the 5′ to 3 sequence of each finalized chimeric nucleic acid) in each combination is by design (or non-stochastic) as described above. Because of the non-stochastic nature of this invention, the possibility of unwanted side products is greatly reduced.

[0320] In another aspect, the ligation reassembly method is performed systematically. For example, the method is performed in order to generate a systematically compartmentalized library of progeny molecules, with compartments that can be screened systematically, e.g. one by one. In other words this invention provides that, through the selective and judicious use of specific nucleic acid building blocks, coupled with the selective and judicious use of sequentially stepped assembly reactions, a design can be achieved where specific sets of progeny products are made in each of several reaction vessels. This allows a systematic examination and screening procedure to be performed. Thus, these methods allow a potentially very large number of progeny molecules to be examined systematically in smaller groups. Because of its ability to perform chimerizations in a manner that is highly flexible yet exhaustive and systematic as well, particularly when there is a low level of homology among the progenitor molecules, these methods provide for the generation of a library (or set) comprised of a large number of progeny molecules. Because of the non-stochastic nature of the instant ligation reassembly invention, the progeny molecules generated preferably comprise a library of finalized chimeric nucleic acid molecules having an overall assembly order that is chosen by design. The saturation mutagenesis and optimized directed evolution methods also can be used to generate different progeny molecular species. It is appreciated that the invention provides freedom of choice and control regarding the selection of demarcation points, the size and number of the nucleic acid building blocks, and the size and design of the couplings. It is appreciated, furthermore, that the requirement for intermolecular homology is highly relaxed for the operability of this invention. In fact, demarcation points can even be chosen in areas of little or no intermolecular homology. For example, because of codon wobble, i.e. the degeneracy of codons, nucleotide substitutions can be introduced into nucleic acid building blocks without altering the amino acid originally encoded in the corresponding progenitor template. Alternatively, a codon can be altered such that the coding for an originally amino acid is altered. This invention provides that such substitutions can be introduced into the nucleic acid building block in order to increase the incidence of intermolecular homologous demarcation points and thus to allow an increased number of couplings to be achieved among the building blocks, which in turn allows a greater number of progeny chimeric molecules to be generated.

[0321] In another aspect, the synthetic nature of the step in which the building blocks are generated allows the design and introduction of nucleotides (e.g., one or more nucleotides, which may be, for example, codons or introns or regulatory sequences) that can later be optionally removed in an in vitro process (e.g. by mutagenesis) or in an in vivo process (e.g. by utilizing the gene splicing ability of a host organism). It is appreciated that in many instances the introduction of these nucleotides may also be desirable for many other reasons in addition to the potential benefit of creating a serviceable demarcation point.

[0322] In one aspect, a nucleic acid building block is used to introduce an intron. Thus, functional introns are introduced into a man-made gene manufactured according to the methods described herein. The artificially introduced intron(s) can be functional in a host cells for gene splicing much in the way that naturally-occurring introns serve functionally in gene splicing.

[0323] Optimized Directed Evolution System

[0324] The invention provides a non-stochastic gene modification system termed “optimized directed evolution system” to generate hydrolases and antibodies with new or altered properties. Optimized directed evolution is directed to the use of repeated cycles of reductive reassortment, recombination and selection that allow for the directed molecular evolution of nucleic acids through recombination. Optimized directed evolution allows generation of a large population of evolved chimeric sequences, wherein the generated population is significantly enriched for sequences that have a predetermined number of crossover events.

[0325] A crossover event is a point in a chimeric sequence where a shift in sequence occurs from one parental variant to another parental variant. Such a point is normally at the juncture of where oligonucleotides from two parents are ligated together to form a single sequence. This method allows calculation of the correct concentrations of oligonucleotide sequences so that the final chimeric population of sequences is enriched for the chosen number of crossover events. This provides more control over choosing chimeric variants having a predetermined number of crossover events.

[0326] In addition, this method provides a convenient means for exploring a tremendous amount of the possible protein variant space in comparison to other systems. Previously, if one generated, for example, 10¹³ chimeric molecules during a reaction, it would be extremely difficult to test such a high number of chimeric variants for a particular activity. Moreover, a significant portion of the progeny population would have a very high number of crossover events which resulted in proteins that were less likely to have increased levels of a particular activity. By using these methods, the population of chimerics molecules can be enriched for those variants that have a particular number of crossover events. Thus, although one can still generate 10¹³ chimeric molecules during a reaction, each of the molecules chosen for further analysis most likely has, for example, only three crossover events. Because the resulting progeny population can be skewed to have a predetermined number of crossover events, the boundaries on the functional variety between the chimeric molecules is reduced. This provides a more manageable number of variables when calculating which oligonucleotide from the original parental polynucleotides might be responsible for affecting a particular trait.

[0327] One method for creating a chimeric progeny polynucleotide sequence is to create oligonucleotides corresponding to fragments or portions of each parental sequence. Each oligonucleotide preferably includes a unique region of overlap so that mixing the oligonucleotides together results in a new variant that has each oligonucleotide fragment assembled in the correct order. Alternatively protocols for practicing these methods of the invention can be found in U.S. Pat. Nos. 6,773,900; 6,740,506; 6,713,282; 6,635,449; 6,605,449; 6,537,776; 6,361,974.

[0328] The number of oligonucleotides generated for each parental variant bears a relationship to the total number of resulting crossovers in the chimeric molecule that is ultimately created. For example, three parental nucleotide sequence variants might be provided to undergo a ligation reaction in order to find a chimeric variant having, for example, greater activity at high temperature. As one example, a set of 50 oligonucleotide sequences can be generated corresponding to each portions of each parental variant. Accordingly, during the ligation reassembly process there could be up to 50 crossover events within each of the chimeric sequences. The probability that each of the generated chimeric polynucleotides will contain oligonucleotides from each parental variant in alternating order is very low. If each oligonucleotide fragment is present in the ligation reaction in the same molar quantity it is likely that in some positions oligonucleotides from the same parental polynucleotide will ligate next to one another and thus not result in a crossover event. If the concentration of each oligonucleotide from each parent is kept constant during any ligation step in this example, there is a ⅓ chance (assuming 3 parents) that an oligonucleotide from the same parental variant will ligate within the chimeric sequence and produce no crossover.

[0329] Accordingly, a probability density function (PDF) can be determined to predict the population of crossover events that are likely to occur during each step in a ligation reaction given a set number of parental variants, a number of oligonucleotides corresponding to each variant, and the concentrations of each variant during each step in the ligation reaction. The statistics and mathematics behind determining the PDF is described below. By utilizing these methods, one can calculate such a probability density function, and thus enrich the chimeric progeny population for a predetermined number of crossover events resulting from a particular ligation reaction. Moreover, a target number of crossover events can be predetermined, and the system then programmed to calculate the starting quantities of each parental oligonucleotide during each step in the ligation reaction to result in a probability density function that centers on the predetermined number of crossover events. These methods are directed to the use of repeated cycles of reductive reassortment, recombination and selection that allow for the directed molecular evolution of a nucleic acid encoding a polypeptide through recombination. This system allows generation of a large population of evolved chimeric sequences, wherein the generated population is significantly enriched for sequences that have a predetermined number of crossover events. A crossover event is a point in a chimeric sequence where a shift in sequence occurs from one parental variant to another parental variant. Such a point is normally at the juncture of where oligonucleotides from two parents are ligated together to form a single sequence. The method allows calculation of the correct concentrations of oligonucleotide sequences so that the final chimeric population of sequences is enriched for the chosen number of crossover events. This provides more control over choosing chimeric variants having a predetermined number of crossover events.

[0330] Determining Crossover Events

[0331] Aspects of the invention include a system and software that receive a desired crossover probability density function (PDF), the number of parent genes to be reassembled, and the number of fragments in the reassembly as inputs. The output of this program is a “fragment PDF” that can be used to determine a recipe for producing reassembled genes, and the estimated crossover PDF of those genes. The processing described herein is preferably performed in MATLAB™ (The Mathworks, Natick, Mass.) a programming language and development environment for technical computing.

[0332] Iterative Processes

[0333] In practicing the invention, these processes can be iteratively repeated. For example a nucleic acid (or, the nucleic acid) responsible for an altered hydrolase or antibody phenotype is identified, re-isolated, again modified, re-tested for activity. This process can be iteratively repeated until a desired phenotype is engineered. For example, an entire biochemical anabolic or catabolic pathway can be engineered into a cell, including proteolytic activity.

[0334] Similarly, if it is determined that a particular oligonucleotide has no affect at all on the desired trait (e.g., a new hydrolase phenotype), it can be removed as a variable by synthesizing larger parental oligonucleotides that include the sequence to be removed. Since incorporating the sequence within a larger sequence prevents any crossover events, there will no longer be any variation of this sequence in the progeny polynucleotides. This iterative practice of determining which oligonucleotides are most related to the desired trait, and which are unrelated, allows more efficient exploration all of the possible protein variants that might be provide a particular trait or activity.

[0335] In Vivo Shuffling

[0336] In vivo shuffling of molecules is use in methods of the invention that provide variants of polypeptides of the invention, e.g., antibodies, hydrolases, and the like. In vivo shuffling can be performed utilizing the natural property of cells to recombine multimers. While recombination is vivo has provided the major natural route to molecular diversity, genetic recombination remains a relatively complex process that involves 1) the recognition of homologies; 2) strand cleavage, strand invasion, and metabolic steps leading to the production of recombinant chiasma; and finally 3) the resolution of chiasma into discrete recombined molecules. The formation of the chiasma requires the recognition of homologous sequences.

[0337] In one aspect, the invention provides a method for producing a hybrid polynucleotide from at least a first polynucleotide and a second polynucleotide. The invention can be used to produce a hybrid polynucleotide by introducing at least a first polynucleotide and a second polynucleotide which share at least one region of partial sequence homology into a suitable host cell. The regions of partial sequence homology promote processes which result in sequence reorganization producing a hybrid polynucleotide. The term “hybrid polynucleotide”, as used herein, is any nucleotide sequence which results from the method of the present invention and contains sequence from at least two original polynucleotide sequences. Such hybrid polynucleotides can result from intermolecular recombination events which promote sequence integration between DNA molecules. In addition, such hybrid polynucleotides can result from intramolecular reductive reassortment processes which utilize repeated sequences to alter a nucleotide sequence within a DNA molecule.

[0338] Producing Sequence Variants

[0339] The invention also provides methods of making sequence variants of the nucleic acid and hydrolase and antibody sequences of the invention or isolating hydrolases using the nucleic acids and polypeptides of the invention. In one aspect, the invention provides for variants of a hydrolase gene of the invention, which can be altered by any means, including, e.g., random or stochastic methods, or, non-stochastic, or “directed evolution,” methods, as described above.

[0340] The isolated variants may be naturally occurring. Variant can also be created in vitro. Variants may be created using genetic engineering techniques such as site directed mutagenesis, random chemical mutagenesis, Exonuclease III deletion procedures, and standard cloning techniques. Alternatively, such variants, fragments, analogs, or derivatives may be created using chemical synthesis or modification procedures. Other methods of making variants are also familiar to those skilled in the art. These include procedures in which nucleic acid sequences obtained from natural isolates are modified to generate nucleic acids which encode polypeptides having characteristics which enhance their value in industrial or laboratory applications. In such procedures, a large number of variant sequences having one or more nucleotide differences with respect to the sequence obtained from the natural isolate are generated and characterized. These nucleotide differences can result in amino acid changes with respect to the polypeptides encoded by the nucleic acids from the natural isolates.

[0341] For example, variants may be created using error prone PCR. In error prone PCR, PCR is performed under conditions where the copying fidelity of the DNA polymerase is low, such that a high rate of point mutations is obtained along the entire length of the PCR product. Error prone PCR is described, e.g., in Leung (1989) Technique 1:11-15; Caldwell, R. C. & Joyce G. F., PCR Methods Applic., 2:28-33, 1992. Briefly, in such procedures, nucleic acids to be mutagenized are mixed with PCR primers, reaction buffer, MgCl₂, MnCl₂, Taq polymerase and an appropriate concentration of dNTPs for achieving a high rate of point mutation along the entire length of the PCR product. For example, the reaction may be performed using 20 fmoles of nucleic acid to be mutagenized, 30 pmole of each PCR primer, a reaction buffer comprising 50 mM KCl, 10 mM Tris HCl (pH 8.3) and 0.01% gelatin, 7 mM MgCl₂, 0.5 mM MnCl₂, 5 units of Taq polymerase, 0.2 mM dGTP, 0.2 mM dATP, 1 mM dCTP, and 1 mM dTTP. PCR may be performed for 30 cycles of 94° C. for 1 min, 45° C. for 1 min, and 72° C. for 1 min. However, it will be appreciated that these parameters may be varied as appropriate. The mutagenized nucleic acids are cloned into an appropriate vector and the activities of the polypeptides encoded by the mutagenized nucleic acids is evaluated.

[0342] Variants may also be created using oligonucleotide directed mutagenesis to generate site-specific mutations in any cloned DNA of interest. Oligonucleotide mutagenesis is described, e.g., in Reidhaar-Olson (1988) Science 241:53-57. Briefly, in such procedures a plurality of double stranded oligonucleotides bearing one or more mutations to be introduced into the cloned DNA are synthesized and inserted into the cloned DNA to be mutagenized. Clones containing the mutagenized DNA are recovered and the activities of the polypeptides they encode are assessed.

[0343] Another method for generating variants is assembly PCR. Assembly PCR involves the assembly of a PCR product from a mixture of small DNA fragments. A large number of different PCR reactions occur in parallel in the same vial, with the products of one reaction priming the products of another reaction. Assembly PCR is described in, e.g., U.S. Pat. No. 5,965,408.

[0344] Still another method of generating variants is sexual PCR mutagenesis. In sexual PCR mutagenesis, forced homologous recombination occurs between DNA molecules of different but highly related DNA sequence in vitro, as a result of random fragmentation of the DNA molecule based on sequence homology, followed by fixation of the crossover by primer extension in a PCR reaction. Sexual PCR mutagenesis is described, e.g., in Stemmer (1994) Proc. Natl. Acad. Sci. USA 91:10747-10751. Briefly, in such procedures a plurality of nucleic acids to be recombined are digested with DNase to generate fragments having an average size of 50-200 nucleotides. Fragments of the desired average size are purified and resuspended in a PCR mixture. PCR is conducted under conditions which facilitate recombination between the nucleic acid fragments. For example, PCR may be performed by resuspending the purified fragments at a concentration of 10-30 ng/l in a solution of 0.2 mM of each DNTP, 2.2 mM MgCl₂, 50 mM KCL, 10 mM Tris HCl, pH 9.0, and 0.1% Triton X-100. 2.5 units of Taq polymerase per 100:1 of reaction mixture is added and PCR is performed using the following regime: 94° C. for 60 seconds, 94° C. for 30 seconds, 50-55° C. for 30 seconds, 72° C. for 30 seconds (30-45 times) and 72° C. for 5 minutes. However, it will be appreciated that these parameters may be varied as appropriate. In some aspects, oligonucleotides may be included in the PCR reactions. In other aspects, the Klenow fragment of DNA polymerase I may be used in a first set of PCR reactions and Taq polymerase may be used in a subsequent set of PCR reactions. Recombinant sequences are isolated and the activities of the polypeptides they encode are assessed.

[0345] Variants may also be created by in vivo mutagenesis. In some aspects, random mutations in a sequence of interest are generated by propagating the sequence of interest is in a bacterial strain, such as an E. coli strain, which carries mutations in one or more of the DNA repair pathways. Such “mutator” strains have a higher random mutation rate than that of a wild-type parent. Propagating the DNA in one of these strains will eventually generate random mutations within the DNA. Mutator strains suitable for use for in vivo mutagenesis are described, e.g., in PCT Publication No. WO 91/16427.

[0346] Variants may also be generated using cassette mutagenesis. In cassette mutagenesis a small region of a double stranded DNA molecule is replaced with a synthetic oligonucleotide “cassette” that differs from the native sequence. The oligonucleotide often contains completely and/or partially randomized native sequence.

[0347] Recursive ensemble mutagenesis may also be used to generate variants. Recursive ensemble mutagenesis is an algorithm for protein engineering (protein mutagenesis) developed to produce diverse populations of phenotypically related mutants whose members differ in amino acid sequence. This method uses a feedback mechanism to control successive rounds of combinatorial cassette mutagenesis. Recursive ensemble mutagenesis is described, e.g., in Arkin (1992) Proc. Natl. Acad. Sci. USA 89:7811-7815.

[0348] In some aspects, variants are created using exponential ensemble mutagenesis. Exponential ensemble mutagenesis is a process for generating combinatorial libraries with a high percentage of unique and functional mutants, wherein small groups of residues are randomized in parallel to identify, at each altered position, amino acids which lead to functional proteins. Exponential ensemble mutagenesis is described, e.g., in Delegrave (1993) Biotechnology Res. 11: 1548-1552. Random and site-directed mutagenesis are described, e.g., in Arnold (1993) Current Opinion in Biotechnology 4:450-455.

[0349] In some aspects, the variants are created using shuffling procedures wherein portions of a plurality of nucleic acids which encode distinct polypeptides are fused together to create chimeric nucleic acid sequences which encode chimeric polypeptides as described in, e.g., U.S. Pat. Nos. 5,965,408; 5,939,250.

[0350] The invention also provides variants of polypeptides of the invention comprising sequences in which one or more of the amino acid residues (e.g., of an exemplary polypeptide, such as SEQ ID NO:2, SEQ ID NO:4, SEQ ID NO:6, SEQ ID NO:8, etc.) are substituted with a conserved or non-conserved amino acid residue (e.g., a conserved amino acid residue) and such substituted amino acid residue may or may not be one encoded by the genetic code. Conservative substitutions are those that substitute a given amino acid in a polypeptide by another amino acid of like characteristics. Thus, polypeptides of the invention include those with conservative substitutions of sequences of the invention, e.g., the exemplary sequences of the invention, such as SEQ ID NO:2, SEQ ID NO:4, SEQ ID NO:6, SEQ ID NO:8, etc., including but not limited to the following replacements: replacements of an aliphatic amino acid such as Alanine, Valine, Leucine and Isoleucine with another aliphatic amino acid; replacement of a Serine with a Threonine or vice versa; replacement of an acidic residue such as Aspartic acid and Glutamic acid with another acidic residue; replacement of a residue bearing an amide group, such as Asparagine and Glutamine, with another residue bearing an amide group; exchange of a basic residue such as Lysine and Arginine with another basic residue; and replacement of an aromatic residue such as Phenylalanine, Tyrosine with another aromatic residue. Other variants are those in which one or more of the amino acid residues of the polypeptides of the invention includes a substituent group.

[0351] Other variants within the scope of the invention are those in which the polypeptide is associated with another compound, such as a compound to increase the half-life of the polypeptide, for example, polyethylene glycol. Additional variants within the scope of the invention are those in which additional amino acids are fused to the polypeptide, such as a leader sequence, a secretory sequence, a proprotein sequence or a sequence which facilitates purification, enrichment, or stabilization of the polypeptide. In some aspects, the variants, fragments, derivatives and analogs of the polypeptides of the invention retain the same biological function or activity as the exemplary polypeptides, e.g., a proteolytic activity, as described herein. In other aspects, the variant, fragment, derivative, or analog includes a proprotein, such that the variant, fragment, derivative, or analog can be activated by cleavage of the proprotein portion to produce an active polypeptide.

[0352] Optimizing Codons to Achieve High Levels of Protein Expression in Host Cells

[0353] The invention provides methods for modifying hydrolase-encoding nucleic acids to modify codon usage. In one aspect, the invention provides methods for modifying codons in a nucleic acid encoding a hydrolase to increase or decrease its expression in a host cell, e.g., a bacterial, insect, mammalian, yeast or plant cell. The invention also provides nucleic acids encoding a hydrolase modified to increase its expression in a host cell, hydrolase so modified, and methods of making the modified hydrolases. The method comprises identifying a “non-preferred” or a “less preferred” codon in hydrolase-encoding nucleic acid and replacing one or more of these non-preferred or less preferred codons with a “preferred codon” encoding the same amino acid as the replaced codon and at least one non-preferred or less preferred codon in the nucleic acid has been replaced by a preferred codon encoding the same amino acid. A preferred codon is a codon over-represented in coding sequences in genes in the host cell and a non-preferred or less preferred codon is a codon under-represented in coding sequences in genes in the host cell.

[0354] Host cells for expressing the nucleic acids, expression cassettes and vectors of the invention include bacteria, yeast, fungi, plant cells, insect cells and mammalian cells. Thus, the invention provides methods for optimizing codon usage in all of these cells, codon-altered nucleic acids and polypeptides made by the codon-altered nucleic acids. Exemplary host cells include gram negative bacteria, such as Escherichia coli; gram positive bacteria, such as any Bacillus (e.g., B. cereus or B. subtilis) or Streptomyces, Lactobacillus gasseri, Lactococcus lactis, Lactococcus cremoris. Exemplary host cells also include eukaryotic organisms, e.g., various yeast, such as Saccharomyces sp., including Saccharomyces cerevisiae, Schizosaccharomyces pombe, Pichia pastoris, and Kluyveromyces lactis, Hansenula polymorpha, Aspergillus niger, and mammalian cells and cell lines and insect cells and cell lines. Thus, the invention also includes nucleic acids and polypeptides optimized for expression in these organisms and species.

[0355] For example, the codons of a nucleic acid encoding a hydrolase isolated from a bacterial cell are modified such that the nucleic acid is optimally expressed in a bacterial cell different from the bacteria from which the hydrolase was derived, a yeast, a fungi, a plant cell, an insect cell or a mammalian cell. Methods for optimizing codons are well known in the art, see, e.g., U.S. Pat. No. 5,795,737; Baca (2000) Int. J. Parasitol. 30:113-118; Hale (1998) Protein Expr. Purif. 12:185-188; Narum (2001) Infect. Immun. 69:7250-7253. See also Narum (2001) Infect. Immun. 69:7250-7253, describing optimizing codons in mouse systems; Outchkourov (2002) Protein Expr. Purif. 24:18-24, describing optimizing codons in yeast; Feng (2000) Biochemistry 39:15399-15409, describing optimizing codons in E. coli; Humphreys (2000) Protein Expr. Purif. 20:252-264, describing optimizing codon usage that affects secretion in E. coli.

### Transgenic Non-Human Animals

[0356] The invention provides transgenic non-human animals comprising a nucleic acid, a polypeptide (e.g., a hydrolase or an antibody of the invention), an expression cassette, a vector, a transfected or a transformed cell of the invention. The transgenic non-human animals can be, e.g., goats, rabbits, sheep, pigs, cows, rats and mice, comprising the nucleic acids of the invention. These animals can be used, e.g., as in vivo models to study hydrolase activity, or, as models to screen for agents that change the hydrolase activity in vivo. The coding sequences for the polypeptides to be expressed in the transgenic non-human animals can be designed to be constitutive, or, under the control of tissue-specific, developmental-specific or inducible transcriptional regulatory factors. Transgenic non-human animals can be designed and generated using any method known in the art; see, e.g., U.S. Pat. Nos. 6,211,428; 6,187,992; 6,156,952; 6,118,044; 6,111,166; 6,107,541; 5,959,171; 5,922,854; 5,892,070; 5,880,327; 5,891,698; 5,639,940; 5,573,933; 5,387,742; 5,087,571, describing making and using transformed cells and eggs and transgenic mice, rats, rabbits, sheep, pigs and cows. See also, e.g., Pollock (1999) J. Immunol. Methods 231:147-157, describing the production of recombinant proteins in the milk of transgenic dairy animals; Baguisi (1999) Nat. Biotechnol. 17:456-461, demonstrating the production of transgenic goats. U.S. Pat. No. 6,211,428, describes making and using transgenic non-human mammals which express in their brains a nucleic acid construct comprising a DNA sequence. U.S. Pat. No. 5,387,742, describes injecting cloned recombinant or synthetic DNA sequences into fertilized mouse eggs, implanting the injected eggs in pseudo-pregnant females, and growing to term transgenic mice whose cells express proteins related to the pathology of Alzheimer's disease. U.S. Pat. No. 6,187,992, describes making and using a transgenic mouse whose genome comprises a disruption of the gene encoding amyloid precursor protein (APP).

[0357] “Knockout animals” can also be used to practice the methods of the invention. For example, in one aspect, the transgenic or modified animals of the invention comprise a “knockout animal,” e.g., a “knockout mouse,” engineered not to express an endogenous gene, which is replaced with a gene expressing a hydrolase of the invention, or, a fusion protein comprising a hydrolase of the invention. As noted above, functional knockouts can also be generated using antisense sequences of the invention, e.g., double-stranded RNAi molecules.

### Transgenic Plants and Seeds

[0358] The invention provides transgenic plants and seeds comprising a nucleic acid, a polypeptide (e.g., a hydrolase or an antibody of the invention), an expression cassette or vector or a transfected or transformed cell of the invention. The transgenic plant can be dicotyledonous (a dicot) or monocotyledonous (a monocot). The invention also provides methods of making and using these transgenic plants and seeds. The transgenic plant or plant cell expressing a polypeptide of the present invention may be constructed in accordance with any method known in the art. See, for example, U.S. Pat. No. 6,309,872.

[0359] Nucleic acids and expression constructs of the invention can be introduced into a plant cell by any means. For example, nucleic acids or expression constructs can be introduced into the genome of a desired plant host, or, the nucleic acids or expression constructs can be episomes. Introduction into the genome of a desired plant can be such that the host's hydrolase production is regulated by endogenous transcriptional or translational control elements. The invention also provides “knockout plants” where insertion of gene sequence by, e.g., homologous recombination, has disrupted the expression of the endogenous gene. Means to generate “knockout” plants are well-known in the art, see, e.g., Strepp (1998) Proc Natl. Acad. Sci. USA 95:4368-4373; Miao (1995) Plant J 7:359-365. See discussion on transgenic plants, below.

[0360] The nucleic acids of the invention can be used to confer desired traits on essentially any plant, e.g., on oilseed producing plants, including rice bran, rapeseed (canola), sunflower, olive, palm or soy, and the like, or on glucose or starch-producing plants, such as corn, potato, wheat, rice, barley, and the like. Nucleic acids of the invention can be used to manipulate metabolic pathways of a plant in order to optimize or alter host's expression of a hydrolase or a substrate or product of a hydrolase, e.g., an oil, a lipid, such as a mono-, di- or tri-acylglyceride and the like. The can change the ratios of lipids, lipid conversion and turnover in a plant. This can facilitate industrial processing of a plant. Alternatively, hydrolases of the invention can be used in production of a transgenic plant to produce a compound not naturally produced by that plant. This can lower production costs or create a novel product.

[0361] In one aspect, the first step in production of a transgenic plant involves making an expression construct for expression in a plant cell. These techniques are well known in the art. They can include selecting and cloning a promoter, a coding sequence for facilitating efficient binding of ribosomes to mRNA and selecting the appropriate gene terminator sequences. One exemplary constitutive promoter is CaMV35S, from the cauliflower mosaic virus, which generally results in a high degree of expression in plants. Other promoters are more specific and respond to cues in the plant's internal or external environment. An exemplary light-inducible promoter is the promoter from the cab gene, encoding the major chlorophyll a/b binding protein.

[0362] In one aspect, the nucleic acid is modified to achieve greater expression in a plant cell. For example, a sequence of the invention is likely to have a higher percentage of A-T nucleotide pairs compared to that seen in a plant, some of which prefer G-C nucleotide pairs. Therefore, A-T nucleotides in the coding sequence can be substituted with G-C nucleotides without significantly changing the amino acid sequence to enhance production of the gene product in plant cells.

[0363] Selectable marker gene can be added to the gene construct in order to identify plant cells or tissues that have successfully integrated the transgene. This may be necessary because achieving incorporation and expression of genes in plant cells is a rare event, occurring in just a few percent of the targeted tissues or cells. Selectable marker genes encode proteins that provide resistance to agents that are normally toxic to plants, such as antibiotics or herbicides. Only plant cells that have integrated the selectable marker gene will survive when grown on a medium containing the appropriate antibiotic or herbicide. As for other inserted genes, marker genes also require promoter and termination sequences for proper function.

[0364] In one aspect, making transgenic plants or seeds comprises incorporating sequences of the invention and, optionally, marker genes into a target expression construct (e.g., a plasmid, a phage), along with positioning of the promoter and the terminator sequences. This can involve transferring the modified gene into the plant through a suitable method. For example, a construct may be introduced directly into the genomic DNA of the plant cell using techniques such as electroporation and microinjection of plant cell protoplasts, or the constructs can be introduced directly to plant tissue using ballistic methods, such as DNA particle bombardment. For example, see, e.g., Christou (1997) Plant Mol. Biol. 35:197-203; Pawlowski (1996) Mol. Biotechnol. 6:17-30; Klein (1987) Nature 327:70-73; Takumi (1997) Genes Genet. Syst. 72:63-69, discussing use of particle bombardment to introduce transgenes into wheat; and Adam (1997) supra, for use of particle bombardment to introduce YACs into plant cells. For example, Rinehart (1997) supra, used particle bombardment to generate transgenic cotton plants. Apparatus for accelerating particles is described U.S. Pat. No. 5,015,580; and, the commercially available BioRad (Biolistics) PDS-2000 particle acceleration instrument; see also, John, U.S. Pat. No. 5,608,148; and Ellis, U.S. Pat. No. 5,681,730, describing particle-mediated transformation of gymnosperms.

[0365] In one aspect, protoplasts can be immobilized and injected with a nucleic acids, e.g., an expression construct. Although plant regeneration from protoplasts is not easy with cereals, plant regeneration is possible in legumes using somatic embryogenesis from protoplast derived callus. Organized tissues can be transformed with naked DNA using gene gun technique, where DNA is coated on tungsten microprojectiles, shot 1/100th the size of cells, which carry the DNA deep into cells and organelles. Transformed tissue is then induced to regenerate, usually by somatic embryogenesis. This technique has been successful in several cereal species including maize and rice.

[0366] Nucleic acids, e.g., expression constructs, can also be introduced in to plant cells using recombinant viruses. Plant cells can be transformed using viral vectors, such as, e.g., tobacco mosaic virus derived vectors (Rouwendal (1997) Plant Mol. Biol. 33:989-999), see Porta (1996) “Use of viral replicons for the expression of genes in plants,” Mol. Biotechnol. 5:209-221.

[0367] Alternatively, nucleic acids, e.g., an expression construct, can be combined with suitable T-DNA flanking regions and introduced into a conventional Agrobacterium tumefaciens host vector. The virulence functions of the Agrobacterium tumefaciens host will direct the insertion of the construct and adjacent marker into the plant cell DNA when the cell is infected by the bacteria. Agrobacterium tumefaciens-mediated transformation techniques, including disarming and use of binary vectors, are well described in the scientific literature. See, e.g., Horsch (1984) Science 233:496-498; Fraley (1983) Proc. Natl. Acad. Sci. USA 80:4803 (1983); Gene Transfer to Plants, Potrykus, ed. (Springer-Verlag, Berlin 1995). The DNA in an A. tumefaciens cell is contained in the bacterial chromosome as well as in another structure known as a Ti (tumor-inducing) plasmid. The Ti plasmid contains a stretch of DNA termed T-DNA (˜20 kb long) that is transferred to the plant cell in the infection process and a series of vir (virulence) genes that direct the infection process. A. tumefaciens can only infect a plant through wounds: when a plant root or stem is wounded it gives off certain chemical signals, in response to which, the vir genes of A. tumefaciens become activated and direct a series of events necessary for the transfer of the T-DNA from the Ti plasmid to the plant's chromosome. The T-DNA then enters the plant cell through the wound. One speculation is that the T-DNA waits until the plant DNA is being replicated or transcribed, then inserts itself into the exposed plant DNA. In order to use A. tumefaciens as a transgene vector, the tumor-inducing section of T-DNA have to be removed, while retaining the T-DNA border regions and the vir genes. The transgene is then inserted between the T-DNA border regions, where it is transferred to the plant cell and becomes integrated into the plant's chromosomes.

[0368] The invention provides for the transformation of monocotyledonous plants using the nucleic acids of the invention, including important cereals, see Hiei (1997) Plant Mol. Biol. 35:205-218. See also, e.g., Horsch, Science (1984) 233:496; Fraley (1983) Proc. Natl. Acad. Sci. USA 80:4803; Thykjaer (1997) supra; Park (1996) Plant Mol. Biol. 32:1135-1148, discussing T-DNA integration into genomic DNA. See also D'Halluin, U.S. Pat. No. 5,712,135, describing a process for the stable integration of a DNA comprising a gene that is functional in a cell of a cereal, or other monocotyledonous plant.

[0369] In one aspect, the third step can involve selection and regeneration of whole plants capable of transmitting the incorporated target gene to the next generation. Such regeneration techniques rely on manipulation of certain phytohormones in a tissue culture growth medium, typically relying on a biocide and/or herbicide marker that has been introduced together with the desired nucleotide sequences. Plant regeneration from cultured protoplasts is described in Evans et al., Protoplasts Isolation and Culture, Handbook of Plant Cell Culture, pp. 124-176, MacMillilan Publishing Company, New York, 1983; and Binding, Regeneration of Plants, Plant Protoplasts, pp. 21-73, CRC Press, Boca Raton, 1985. Regeneration can also be obtained from plant callus, explants, organs, or parts thereof. Such regeneration techniques are described generally in Klee (1987) Ann. Rev. of Plant Phys. 38:467-486. To obtain whole plants from transgenic tissues such as immature embryos, they can be grown under controlled environmental conditions in a series of media containing nutrients and hormones, a process known as tissue culture. Once whole plants are generated and produce seed, evaluation of the progeny begins.

[0370] After the expression cassette is stably incorporated in transgenic plants, it can be introduced into other plants by sexual crossing. Any of a number of standard breeding techniques can be used, depending upon the species to be crossed. Since transgenic expression of the nucleic acids of the invention leads to phenotypic changes, plants comprising the recombinant nucleic acids of the invention can be sexually crossed with a second plant to obtain a final product. Thus, the seed of the invention can be derived from a cross between two transgenic plants of the invention, or a cross between a plant of the invention and another plant. The desired effects (e.g., expression of the polypeptides of the invention to produce a plant with altered, increased and/or decreased lipid or oil content) can be enhanced when both parental plants express the polypeptides of the invention. The desired effects can be passed to future plant generations by standard propagation means.

[0371] The nucleic acids and polypeptides of the invention are expressed in or inserted in any plant or seed. Transgenic plants of the invention can be dicotyledonous or monocotyledonous. Examples of monocot transgenic plants of the invention are grasses, such as meadow grass (blue grass, Poa), forage grass such as festuca, lolium, temperate grass, such as Agrostis, and cereals, e.g., wheat, oats, rye, barley, rice, sorghum, and maize (corn). Examples of dicot transgenic plants of the invention are tobacco, legumes, such as lupins, potato, sugar beet, pea, bean and soybean, and cruciferous plants (family Brassicaceae), such as cauliflower, rape seed, and the closely related model organism Arabidopsis thaliana. Thus, the transgenic plants and seeds of the invention include a broad range of plants, including, but not limited to, species from the genera Anacardium, Arachis, Asparagus, Atropa, Avena, Brassica, Citrus, Citrullus, Capsicumi, Carthamus, Cocos, Coffea, Cucumis, Cucurbita, Daucus, Elaeis, Fragaria, Glycine, Gossypium, Helianthus, Heterocallis, Hordeum, Hyoscyamus, Lactuca, Linulti, Lolium, Lupinus, Lycopersicon, Malus, Manihot, Majorana, Medicago, Nicotiana, Olea, Oryza, Panieum, Pannisetum, Persea, Phaseolus, Pistachia, Pisuin, Pyrus, Prunus, Raphanus, Ricinus, Secale, Senecio, Sinapis, Solanuin, Sorghum, Theobromus, Trigonella, Triticuni, Vicia, Vitis, Vigna, and Zea.

[0372] In alternative embodiments, the nucleic acids of the invention are expressed in plants which contain fiber cells, including, e.g., cotton, silk cotton tree (Kapok, Ceiba pentandra), desert willow, creosote bush, winterfat, balsa, ramie, kenaf, hemp, roselle, jute, sisal abaca and flax. In alternative embodiments, the transgenic plants of the invention can be members of the genus Gossypium, including members of any Gossypium species, such as G. arboreum; G. herbaceum, G. barbadense, and G. hirsutum.

[0373] The invention also provides for transgenic plants to be used for producing large amounts of the polypeptides (e.g., antibodies, hydrolases) of the invention. For example, see Palmgren (1997) Trends Genet. 13:348; Chong (1997) Transgenic Res. 6:289-296 (producing human milk protein beta-casein in transgenic potato plants using an auxin-inducible, bidirectional mannopine synthase (mas 1′,2′) promoter with Agrobacterium tumefaciens-mediated leaf disc transformation methods).

[0374] Using known procedures, one of skill can screen for plants of the invention by detecting the increase or decrease of transgene mRNA or protein in transgenic plants. Means for detecting and quantitation of mRNAs or proteins are well known in the art.

[0375] In one aspect, the invention produces fatty acids or fatty acid derivatives from transgenic plants of the invention, e.g., transgenic oleaginous plants. In one aspect, transgenic oleaginous plants comprising at least one hydrolase of the invention are produced. In one aspect, the transgenic plant comprises a hydrolase gene operably linked to a promoter, permitting an expression of the gene either in cellular, extracellular or tissue compartments other than those in which the plant lipids accumulate, or permitting exogenous induction of the hydrolase. In one aspect, seeds and/or fruits containing the lipids of the plants are collected, the seeds and/or fruits are crushed (if necessary after hydrolase (e.g., lipase) gene-induction treatment) so as to bring into contact the lipids and hydrolase of the invention contained in the seeds and/or fruits. The mixture can be allowed to incubate to allow enzymatic hydrolysis of the lipids of the ground material by catalytic action of the lipase of the invention contained in the crushed material. In one aspect, the fatty acids formed by the hydrolysis are extracted and/or are converted in order to obtain the desired fatty acid derivatives.

[0376] This enzymatic hydrolysis process of the invention uses mild operating conditions and can be small-scale and use inexpensive installations. In this aspect the plant of the invention is induced to produce the hydrolase for transformation of plant lipids. Using this strategy, the enzyme is prevented from coming into contact with stored plant lipids so as to avoid any risk of premature hydrolysis (“self-degradation of the plant”) before harvesting. The crushing and incubating units can be light and small-scale; many are known in the agricultural industry and can be carried out at the sites where the plants are harvested.

[0377] In one aspect, transgenic plants of the invention are produced by transformation of natural oleaginous plants. The genetically transformed plants of the invention are then reproduced sexually so as to produce transgenic seeds of the invention. These seeds can be used to obtain transgenic plant progeny.

[0378] In one aspect, the hydrolase gene is operably linked to an inducible promoter to prevent any premature contact of hydrolase and plant lipid. This promoter can direct the expression of the gene in compartments other than those where the lipids accumulate or the promoter can initiate the expression of the hydrolase at a desired time by an exogenous induction.

### Polypeptides and Peptides

[0379] The invention provides isolated or recombinant polypeptides having a sequence identity (e.g., at least 50%, etc. sequence identity) to an exemplary sequence of the invention, e.g., SEQ ID NO:2, SEQ ID NO:4, SEQ ID NO:6, SEQ ID NO:8, SEQ ID NO:10, SEQ ID NO:12, SEQ ID NO:14, SEQ ID NO:16, SEQ ID NO:18, SEQ ID NO:20, SEQ ID NO:22, SEQ ID NO:24, SEQ ID NO:26, SEQ ID NO:28, SEQ ID NO:30, SEQ ID NO:32, SEQ ID NO:34, SEQ ID NO:36, SEQ ID NO:38, SEQ ID NO:40, SEQ ID NO:42, SEQ ID NO:44, SEQ ID NO:46, SEQ ID NO:48, SEQ ID NO:50, SEQ ID NO:52, SEQ ID NO:54, SEQ ID NO:56, SEQ ID NO:58, SEQ ID NO:60, SEQ ID NO:62, SEQ ID NO:64, SEQ ID NO:66, SEQ ID NO:68, SEQ ID NO:70, SEQ ID NO:72, SEQ ID NO:74, SEQ ID NO:76, SEQ ID NO:78, SEQ ID NO:80, SEQ ID NO:82, SEQ ID NO:84, SEQ ID NO:86, SEQ ID NO:88, SEQ ID NO:90, SEQ ID NO:92, SEQ ID NO:94, SEQ ID NO:96, SEQ ID NO:98, SEQ ID NO: 100, SEQ ID NO:102, SEQ ID NO:104, SEQ ID NO:106, SEQ ID NO:108, SEQ ID NO:110, SEQ ID NO:112, SEQ ID NO:114, SEQ ID NO:116, SEQ ID NO:118, SEQ ID NO: 120, SEQ ID NO:122, SEQ ID NO:124, SEQ ID NO:126, SEQ ID NO:128, SEQ ID NO:130, SEQ ID NO:132, SEQ ID NO:134, SEQ ID NO:136, SEQ ID NO:138, SEQ ID NO:140, SEQ ID NO:142, SEQ ID NO:143, SEQ ID NO:146, SEQ ID NO:148, SEQ ID NO: 150, SEQ ID NO:152, SEQ ID NO:154, SEQ ID NO:156, SEQ ID NO:158, SEQ ID NO: 160, SEQ ID NO:162, SEQ ID NO:164, SEQ ID NO:166, SEQ ID NO:168, SEQ ID NO: 170, SEQ ID NO:172, SEQ ID NO:174, SEQ ID NO:176, SEQ ID NO:178, SEQ ID NO: 180, SEQ ID NO:182, SEQ ID NO:184, SEQ ID NO:186, SEQ ID NO:188, SEQ ID NO:190, SEQ ID NO:192, SEQ ID NO:194, SEQ ID NO:196, SEQ ID NO:198, SEQ ID NO:200, SEQ ID NO:202, SEQ ID NO:204, SEQ ID NO:206, SEQ ID NO:208, SEQ ID NO:210, SEQ ID NO:212, SEQ ID NO:214, SEQ ID NO:216, SEQ ID NO:218, SEQ ID NO:220, SEQ ID NO:222, SEQ ID NO:224, SEQ ID NO:226, SEQ ID NO:228, SEQ ID NO:230, SEQ ID NO:232, SEQ ID NO:234, SEQ ID NO:236, SEQ ID NO:238, SEQ ID NO:240, SEQ ID NO:242, SEQ ID NO:244, SEQ ID NO:246, SEQ ID NO:248, SEQ ID NO:250, SEQ ID NO:252, SEQ ID NO:254, SEQ ID NO:256, SEQ ID NO:258, SEQ ID NO:260, SEQ ID NO:262, SEQ ID NO:264, SEQ ID NO:266, SEQ ID NO:268, SEQ ID NO:270, SEQ ID NO:272, SEQ ID NO:274, SEQ ID NO:276, SEQ ID NO:278, SEQ ID NO:280, SEQ ID NO:282, SEQ ID NO:284, SEQ ID NO:286, SEQ ID NO:288, SEQ ID NO:290, SEQ ID NO:292, SEQ ID NO:294, SEQ ID NO:296, SEQ ID NO:298, SEQ ID NO:300, SEQ ID NO:302, SEQ ID NO:304, SEQ ID NO:306, SEQ ID NO:308, SEQ ID NO:310, SEQ ID NO:312, SEQ ID NO:314, SEQ ID NO:316, SEQ ID NO:318, SEQ ID NO:320, SEQ ID NO:322, SEQ ID NO:324, SEQ ID NO:326, SEQ ID NO:328, SEQ ID NO:330, SEQ ID NO:332, SEQ ID NO:334, SEQ ID NO:336, SEQ ID NO:338, SEQ ID NO:340, SEQ ID NO:342, SEQ ID NO:344, SEQ ID NO:346, SEQ ID NO:348, SEQ ID NO:350, SEQ ID NO:352, SEQ ID NO:354, SEQ ID NO:356, SEQ ID NO:358, SEQ ID NO:360, SEQ ID NO:362, SEQ ID NO:364, SEQ ID NO:366, SEQ ID NO:368, SEQ ID NO:370, SEQ ID NO:372, SEQ ID NO:374, SEQ ID NO:376, SEQ ID NO:378, SEQ ID NO:380, SEQ ID NO:382, SEQ ID NO:384, SEQ ID NO:386, SEQ ID NO:388, SEQ ID NO:390, SEQ ID NO:392, SEQ ID NO:394, SEQ ID NO:396, SEQ ID NO:398, SEQ ID NO:400, SEQ ID NO:402, SEQ ID NO:404, SEQ ID NO:406, SEQ ID NO:408, SEQ ID NO:410, SEQ ID NO:412, SEQ ID NO:414, SEQ ID NO:416, SEQ ID NO:418, SEQ ID NO:420, SEQ ID NO:422, SEQ ID NO:424, SEQ ID NO:426, SEQ ID NO:428, SEQ ID NO:430, SEQ ID NO:432, SEQ ID NO:434, SEQ ID NO:436, SEQ ID NO:438, SEQ ID NO:440, SEQ ID NO:442, SEQ ID NO:444, SEQ ID NO:446, SEQ ID NO:448, SEQ ID NO:450, SEQ ID NO:452, SEQ ID NO:454, SEQ ID NO:456, SEQ ID NO:458, SEQ ID NO:460, SEQ ID NO:462, SEQ ID NO:464, SEQ ID NO:466, SEQ ID NO:468, SEQ ID NO:470, SEQ ID NO:472, SEQ ID NO:474, SEQ ID NO:476, SEQ ID NO:478, SEQ ID NO:480, SEQ ID NO:482, SEQ ID NO:484, SEQ ID NO:486, SEQ ID NO:488, SEQ ID NO:490, SEQ ID NO:492, SEQ ID NO:494, SEQ ID NO:496, SEQ ID NO:498, SEQ ID NO:500, SEQ ID NO:502, SEQ ID NO:504, SEQ ID NO:506, SEQ ID NO:508, SEQ ID NO:510, SEQ ID NO:512, SEQ ID NO:514, SEQ ID NO:516, SEQ ID NO:518, SEQ ID NO:520, SEQ ID NO:522, SEQ ID NO:524, SEQ ID NO:526, SEQ ID NO:528, SEQ ID NO:530, SEQ ID NO:532, SEQ ID NO:534, SEQ ID NO:536, SEQ ID NO:538, SEQ ID NO:540, SEQ ID NO:542, SEQ ID NO:544, SEQ ID NO:546, SEQ ID NO:548, SEQ ID NO:550, SEQ ID NO:552, SEQ ID NO:554, SEQ ID NO:556, SEQ ID NO:558, SEQ ID NO:560, SEQ ID NO:562, SEQ ID NO:564, SEQ ID NO:566, SEQ ID NO:568, SEQ ID NO:570, SEQ ID NO:572, SEQ ID NO:574, SEQ ID NO:576, SEQ ID NO:578, SEQ ID NO:580, SEQ ID NO:582, SEQ ID NO:584, SEQ ID NO:586, SEQ ID NO:588, SEQ ID NO:590, SEQ ID NO:592, SEQ ID NO:594, SEQ ID NO:596, SEQ ID NO:598, SEQ ID NO:600, SEQ ID NO:602, SEQ ID NO:604, SEQ ID NO:606, SEQ ID NO:608, SEQ ID NO:610, SEQ ID NO:612, SEQ ID NO:614, SEQ ID NO:616, SEQ ID NO:618, SEQ ID NO:620, SEQ ID NO:622, SEQ ID NO:624, SEQ ID NO:626, SEQ ID NO:628, SEQ ID NO:630, SEQ ID NO:632, SEQ ID NO:634, SEQ ID NO:636, SEQ ID NO:638, SEQ ID NO:640, SEQ ID NO:642, SEQ ID NO:644, SEQ ID NO:646, SEQ ID NO:648, SEQ ID NO:650, SEQ ID NO:652, SEQ ID NO:654, SEQ ID NO:656, SEQ ID NO:658, SEQ ID NO:660, SEQ ID NO:662, SEQ ID NO:664, SEQ ID NO:666, SEQ ID NO:668, SEQ ID NO:670, SEQ ID NO:672, SEQ ID NO:674, SEQ ID NO:676, SEQ ID NO:678, SEQ ID NO:680, SEQ ID NO:682, SEQ ID NO:684, SEQ ID NO:686, SEQ ID NO:688, SEQ ID NO:690, SEQ ID NO:692, SEQ ID NO:694, SEQ ID NO:696, SEQ ID NO:698, SEQ ID NO:700, SEQ ID NO:702, SEQ ID NO:704, SEQ ID NO:706, SEQ ID NO:708, SEQ ID NO:710, SEQ ID NO:712, SEQ ID NO:714, SEQ ID NO:716, SEQ ID NO:718, SEQ ID NO:720, SEQ ID NO:722, SEQ ID NO:724, SEQ ID NO:726, SEQ ID NO:728, SEQ ID NO:730, SEQ ID NO:732, SEQ ID NO:734, SEQ ID NO:736, SEQ ID NO:738, SEQ ID NO:740, SEQ ID NO:742, SEQ ID NO:744, SEQ ID NO:746, SEQ ID NO:748, SEQ ID NO:750, SEQ ID NO:752, SEQ ID NO:754, SEQ ID NO:756, SEQ ID NO:758, SEQ ID NO:760, SEQ ID NO:762, SEQ ID NO:764, SEQ ID NO:766, SEQ ID NO:768, SEQ ID NO:770, SEQ ID NO:772, SEQ ID NO:774, SEQ ID NO:776, SEQ ID NO:778, SEQ ID NO:780, SEQ ID NO:782, SEQ ID NO:784, SEQ ID NO:786, SEQ ID NO:788, SEQ ID NO:790, SEQ ID NO:792, SEQ ID NO:794, SEQ ID NO:796, SEQ ID NO:798, SEQ ID NO:800, SEQ ID NO:802, SEQ ID NO:804, SEQ ID NO:808, SEQ ID NO:808, SEQ ID NO:810, SEQ ID NO:812, SEQ ID NO:814, SEQ ID NO:816, SEQ ID NO:818, SEQ ID NO:820, SEQ ID NO:822, SEQ ID NO:824, SEQ ID NO:826, SEQ ID NO:828, SEQ ID NO:830, SEQ ID NO:832, SEQ ID NO:834, SEQ ID NO:836, SEQ ID NO:838, SEQ ID NO:840, SEQ ID NO:842, SEQ ID NO:844, SEQ ID NO:846, SEQ ID NO:848, SEQ ID NO:850, SEQ ID NO:852, SEQ ID NO:854, SEQ ID NO:856, SEQ ID NO:858, SEQ ID NO:860, SEQ ID NO:862, SEQ ID NO:864, SEQ ID NO:866, SEQ ID NO:868, SEQ ID NO:870, SEQ ID NO:872, SEQ ID NO:874, SEQ ID NO:876, SEQ ID NO:878, SEQ ID NO:880, SEQ ID NO:882, SEQ ID NO:884, SEQ ID NO:886, SEQ ID NO:888, SEQ ID NO:890, SEQ ID NO:892, SEQ ID NO:894, SEQ ID NO:896, SEQ ID NO:898, SEQ ID NO:900, SEQ ID NO:902, SEQ ID NO:904, SEQ ID NO:906, SEQ ID NO:908, SEQ ID NO:910, SEQ ID NO:912, SEQ ID NO:914, SEQ ID NO:916, SEQ ID NO:918, SEQ ID NO:920, SEQ ID NO:922, SEQ ID NO:924, SEQ ID NO:926, SEQ ID NO:928, SEQ ID NO:930, SEQ ID NO:932, SEQ ID NO:934, SEQ ID NO:936, SEQ ID NO:938, SEQ ID NO:940, SEQ ID NO:942, SEQ ID NO:944, SEQ ID NO:946, SEQ ID NO:948, SEQ ID NO:950, SEQ ID NO:952, SEQ ID NO:954, SEQ ID NO:956, SEQ ID NO:958, SEQ ID NO:960, SEQ ID NO:962, SEQ ID NO:964, SEQ ID NO:966, SEQ ID NO:968, SEQ ID NO:970, SEQ ID NO:972, SEQ ID NO:974, SEQ ID NO:976, SEQ ID NO:978, SEQ ID NO:980, SEQ ID NO:982, SEQ ID NO:984, SEQ ID NO:986, SEQ ID NO:988, SEQ ID NO:990 and/or SEQ ID NO:992, over a region of at least about 20, 30, 40, 50, 75, 100, 150, 200, 250, 300, 350, 400, 450, 500, 550, 600, 650, 700 or more residues.

[0380] As discussed above, the identity can be over the full length of the polypeptide, or, the identity can be over a region of at least about 50, 60, 70, 80, 90, 100, 150, 200, 250, 300, 350, 400, 450, 500, 550, 600, 650, 700 or more residues. Polypeptides of the invention can also be shorter than the full length of exemplary polypeptides. In one aspect, the invention provides a polypeptide comprising only a subsequence of a sequence of the invention, exemplary subsequences can be about 5, 10, 15, 20, 25, 30, 35, 40, 45, 50, 55, 60, 65, 70, 75, 80, 85, 90, 100, 125, 150, 175, 200, 250, 300, 350, 400, 450, 500, 550, 600, 650, 700, or more residues. In alternative aspects, the invention provides polypeptides (peptides, fragments) ranging in size between about 5 and the full length of a polypeptide, e.g., an enzyme, such as a hydrolase, including an esterase, an acylase, a lipase, a phospholipase or a protease; exemplary sizes being of about 5, 10, 15, 20, 25, 30, 35, 40, 45, 50, 55, 60, 65, 70, 75, 80, 85, 90, 100, 125, 150, 175, 200, 250, 300, 350, 400, 450, 500, 550, 600, 650, 700, or more residues, e.g., contiguous residues of an exemplary hydrolase of the invention. Peptides of the invention can be useful as, e.g., labeling probes, antigens, toleragens, motifs, hydrolase active sites. Polypeptides of the invention also include antibodies capable of binding to a hydrolase of the invention.

[0381] As used herein, the term “hydrolase” encompasses polypeptides (e.g., antibodies, enzymes) and peptides (e.g., “active sites”) having any hydrolase activity, i.e., the polypeptides of the invention can have any hydrolase activity, including lipase, esterase, phospholipase and/or protease activity.

[0382] The term “lipase” includes all polypeptides having any lipase activity, including lipid synthesis or lipid hydrolysis activity, i.e., the polypeptides of the invention can have any lipase activity. Lipases of the invention include enzymes active in the bioconversion of lipids through catalysis of hydrolysis, alcoholysis, acidolysis, esterification and aminolysis reactions. In one aspect, lipases of the invention can hydrolyze lipid emulsions. In one aspect, enzymes of the invention can act preferentially on sn-1 and/or sn-3 bonds of triglycerides to release fatty acids from the glycerol backbone. For example, lipase activity of the polypeptides of the invention include synthesis of cocoa butter, poly-unsaturated fatty acids (PUFAs), 1,3-diacyl glycerides (DAGs), 2-monoglycerides (MAGs) and triacylglycerides (TAGs). The term also includes lipases capable of isomerizing bonds at high temperatures, low temperatures, alkaline pHs and at acidic pHs.

[0383] The term “phospholipase” encompasses enzymes having any phospholipase activity, i.e., the polypeptides of the invention can have any phospholipase activity. For example, a phospholipase activity of the invention can comprise cleaving a glycerolphosphate ester linkage (catalyzing hydrolysis of a glycerolphosphate ester linkage), e.g., in an oil, such as a vegetable oil. A phospholipase activity of the invention can generate a water extractable phosphorylated base and a diglyceride. A phospholipase activity of the invention also includes hydrolysis of glycerolphosphate ester linkages at high temperatures, low temperatures, alkaline pHs and at acidic pHs. The term “a phospholipase activity” also includes cleaving a glycerolphosphate ester to generate a water extractable phosphorylated base and a diglyceride. The term “a phospholipase activity” also includes cutting ester bonds of glycerin and phosphoric acid in phospholipids. The term “a phospholipase activity” also includes other activities, such as the ability to bind to a substrate, such as an oil, e.g. a vegetable oil, substrate also including plant and animal phosphatidylcholines, phosphatidyl-ethanolamines, phosphatidylserines and sphingomyelins. The phospholipase activity can comprise a phospholipase C (PLC) activity, a phospholipase A (PLA) activity, such as a phospholipase A1 or phospholipase A2 activity, a phospholipase B (PLB) activity, such as a phospholipase B1 or phospholipase B2 activity, a phospholipase D (PLD) activity, such as a phospholipase D1 or a phospholipase D2 activity. The phospholipase activity can comprise hydrolysis of a glycoprotein, e.g., as a glycoprotein found in a potato tuber or any plant of the genus Solanum, e.g., Solanum tuberosum. The phospholipase activity can comprise a patatin enzymatic activity, such as a patatin esterase activity (see, e.g., Jimenez (2002) Biotechnol. Prog. 18:635-640). The phospholipase activity can comprise a lipid acyl hydrolase (LAH) activity.

[0384] The term “protease” includes all polypeptides having a protease activity, including a peptidase and/or a proteinase activity; i.e., the polypeptides of the invention can have any protease activity. A protease activity of the invention can comprise catalysis of the hydrolysis of peptide bonds. The proteases of the invention can catalyze peptide hydrolysis reactions in both directions. The direction of the reaction can be determined, e.g., by manipulating substrate and/or product concentrations, temperature, selection of protease and the like. The protease activity can comprise an endoprotease activity and/or an exoprotease activity. The protease activity can comprise a protease activity, e.g., a carboxypeptidase activity, a dipeptidylpeptidase or an aminopeptidase activity, a serine protease activity, a metalloproteinase activity, a cysteine protease activity and/or an aspartic protease activity. In one aspect, protease activity can comprise activity the same or similar to a chymotrypsin, a trypsin, an elastase, a kallikrein and/or a subtilisin activity.

[0385] The term esterase includes all polypeptides having an esterase activity, i.e., the polypeptides of the invention can have any esterase activity. For example, the invention provides polypeptides capable of hydrolyzing ester groups to organic acids and alcohols. The term “esterase” also encompasses polypeptides having lipase activity (in the hydrolysis of lipids), acidolysis reactions (to replace an esterified fatty acid with a free fatty acid), trans-esterification reactions (exchange of fatty acids between triglycerides), ester synthesis and ester interchange reactions. In one aspect, the hydrolases of the invention can hydrolyze a lactone ring or acylate an acyl lactone or a diol lactone. The polypeptides of the invention can be enantiospecific, e.g., as when used in chemoenzymatic reactions in the synthesis of medicaments and insecticides. The polynucleotides of the invention encode polypeptides having esterase activity.

[0386] “Amino acid” or “amino acid sequence” can include an oligopeptide, peptide, polypeptide, or protein sequence, or to a fragment, portion, or subunit of any of these, and to naturally occurring or synthetic molecules. The terms “polypeptide” and “protein” can include amino acids joined to each other by peptide bonds or modified peptide bonds, i.e., peptide isosteres, and may contain modified amino acids other than the 20 gene-encoded amino acids. The term “polypeptide” also includes peptides and polypeptide fragments, motifs and the like. The term also includes glycosylated polypeptides. The peptides and polypeptides of the invention also include all “mimetic” and “peptidomimetic” forms, as described in further detail, below.

[0387] The term “isolated” can mean that the material is removed from its original environment (e.g., the natural environment if it is naturally occurring). For example, a naturally occurring polynucleotide or polypeptide present in a living animal is not isolated, but the same polynucleotide or polypeptide, separated from some or all of the coexisting materials in the natural system, is isolated. Such polynucleotides could be part of a vector and/or such polynucleotides or polypeptides could be part of a composition, and still be isolated in that such vector or composition is not part of its natural environment. As used herein, an isolated material or composition can also be a “purified” composition, i.e., it does not require absolute purity; rather, it is intended as a relative definition. Individual nucleic acids obtained from a library can be conventionally purified to electrophoretic homogeneity. In alternative aspects, the invention provides nucleic acids which have been purified from genomic DNA or from other sequences in a library or other environment by at least one, two, three, four, five or more orders of magnitude.

[0388] The polypeptides of the invention include hydrolases in an active or inactive form. For example, the polypeptides of the invention include proproteins before “maturation” or processing of prepro sequences, e.g., by a proprotein-processing enzyme, such as a proprotein convertase to generate an “active” mature protein. The polypeptides of the invention include hydrolases inactive for other reasons, e.g., before “activation” by a post-translational processing event, e.g., an endo- or exo-peptidase or proteinase action, a phosphorylation event, an amidation, a glycosylation or a sulfation, a dimerization event, and the like. Methods for identifying “prepro” domain sequences and signal sequences are well known in the art, see, e.g., Van de Ven (1993) Crit. Rev. Oncog. 4(2):115-136. For example, to identify a prepro sequence, the protein is purified from the extracellular space and the N-terminal protein sequence is determined and compared to the unprocessed form.

[0389] The polypeptides of the invention include all active forms, including active subsequences, e.g., catalytic domains or active sites, of an enzyme of the invention. In one aspect, the invention provides catalytic domains or active sites as set forth below. In one aspect, the invention provides a peptide or polypeptide comprising or consisting of an active site domain as predicted through use of a database such as Pfam (which is a large collection of multiple sequence alignments and hidden Markov models covering many common protein families, The Pfam protein families database, A. Bateman, E. Birney, L. Cerruti, R. Durbin, L. Etwiller, S. R. Eddy, S. Griffiths-Jones, K. L. Howe, M. Marshall, and E. L. L. Sonnhammer, Nucleic Acids Research, 30(1):276-280, 2002) or equivalent.

[0390] The invention includes polypeptides with or without a signal sequence and/or a prepro sequence. The invention includes polypeptides with heterologous signal sequences and/or prepro sequences. The prepro sequence (including a sequence of the invention used as a heterologous prepro domain) can be located on the amino terminal or the carboxy terminal end of the protein. The invention also includes isolated or recombinant signal sequences, prepro sequences and catalytic domains (e.g., “active sites”) comprising sequences of the invention.

[0391] Polypeptides and peptides of the invention can be isolated from natural sources, be synthetic, or be recombinantly generated polypeptides. Peptides and proteins can be recombinantly expressed in vitro or in vivo. The peptides and polypeptides of the invention can be made and isolated using any method known in the art. Polypeptide and peptides of the invention can also be synthesized, whole or in part, using chemical methods well known in the art. See e.g., Caruthers (1980) Nucleic Acids Res. Symp. Ser. 215-223; Horn (1980) Nucleic Acids Res. Symp. Ser. 225-232; Banga, A. K., Therapeutic Peptides and Proteins, Formulation, Processing and Delivery Systems (1995) Technomic Publishing Co., Lancaster, Pa. For example, peptide synthesis can be performed using various solid-phase techniques (see e.g., Roberge (1995) Science 269:202; Merrifield (1997) Methods Enzymol. 289:3-13) and automated synthesis may be achieved, e.g., using the ABI 431A Peptide Synthesizer (Perkin Elmer) in accordance with the instructions provided by the manufacturer.

[0392] The peptides and polypeptides of the invention can also be glycosylated. The glycosylation can be added post-translationally either chemically or by cellular biosynthetic mechanisms, wherein the later incorporates the use of known glycosylation motifs, which can be native to the sequence or can be added as a peptide or added in the nucleic acid coding sequence. The glycosylation can be O-linked or N-linked.

[0393] The peptides and polypeptides of the invention, as defined above, include all “mimetic” and “peptidomimetic” forms. The terms “mimetic” and “peptidomimetic” refer to a synthetic chemical compound which has substantially the same structural and/or functional characteristics of the polypeptides of the invention. The mimetic can be either entirely composed of synthetic, non-natural analogues of amino acids, or, is a chimeric molecule of partly natural peptide amino acids and partly non-natural analogs of amino acids. The mimetic can also incorporate any amount of natural amino acid conservative substitutions as long as such substitutions also do not substantially alter the mimetic's structure and/or activity. As with polypeptides of the invention which are conservative variants, routine experimentation will determine whether a mimetic is within the scope of the invention, i.e., that its structure and/or function is not substantially altered. Thus, in one aspect, a mimetic composition is within the scope of the invention if it has a hydrolase activity.

[0394] Polypeptide mimetic compositions of the invention can contain any combination of non-natural structural components. In alternative aspect, mimetic compositions of the invention include one or all of the following three structural groups: a) residue linkage groups other than the natural amide bond (“peptide bond”) linkages; b) non-natural residues in place of naturally occurring amino acid residues; or c) residues which induce secondary structural mimicry, i.e., to induce or stabilize a secondary structure, e.g., a beta turn, gamma turn, beta sheet, alpha helix conformation, and the like. For example, a polypeptide of the invention can be characterized as a mimetic when all or some of its residues are joined by chemical means other than natural peptide bonds. Individual peptidomimetic residues can be joined by peptide bonds, other chemical bonds or coupling means, such as, e.g., glutaraldehyde, N-hydroxysuccinimide esters, bifunctional maleimides, N,N′-dicyclohexylcarbodiimide (DCC) or N,N′-diisopropylcarbodiimide (DIC). Linking groups that can be an alternative to the traditional amide bond (“peptide bond”) linkages include, e.g., ketomethylene (e.g., —C(═O)—CH₂— for —C(═O)—NH—), aminomethylene (CH₂—NH), ethylene, olefin (CH═CH), ether (CH₂—O), thioether (CH₂—S), tetrazole (CN₄—), thiazole, retroamide, thioamide, or ester (see, e.g., Spatola (1983) in Chemistry and Biochemistry of Amino Acids, Peptides and Proteins, Vol. 7, pp 267-357, “Peptide Backbone Modifications,” Marcell Dekker, NY).

[0395] A polypeptide of the invention can also be characterized as a mimetic by containing all or some non-natural residues in place of naturally occurring amino acid residues. Non-natural residues are well described in the scientific and patent literature; a few exemplary non-natural compositions useful as mimetics of natural amino acid residues and guidelines are described below. Mimetics of aromatic amino acids can be generated by replacing by, e.g., D- or L-naphylalanine; D- or L-phenylglycine; D- or L-2 thieneylalanine; D- or L-1, -2,3-, or 4-pyreneylalanine; D- or L-3 thieneylalanine; D- or L-(2-pyridinyl)-alanine; D- or L-(3-pyridinyl)-alanine; D- or L-(2-pyrazinyl)-alanine; D- or L-(4-isopropyl)-phenylglycine; D-(trifluoromethyl)-phenylglycine; D-(trifluoromethyl)-phenylalanine; D-p-fluoro-phenylalanine; D- or L-p-biphenylphenylalanine; D- or L-p-methoxy-biphenylphenylalanine; D- or L-2-indole(alkyl)alanines; and, D- or L-alkylainines, where alkyl can be substituted or unsubstituted methyl, ethyl, propyl, hexyl, butyl, pentyl, isopropyl, iso-butyl, sec-isotyl, iso-pentyl, or a non-acidic amino acids. Aromatic rings of a non-natural amino acid include, e.g., thiazolyl, thiophenyl, pyrazolyl, benzimidazolyl, naphthyl, furanyl, pyrrolyl, and pyridyl aromatic rings.

[0396] Mimetics of acidic amino acids can be generated by substitution by, e.g., non-carboxylate amino acids while maintaining a negative charge; (phosphono)alanine; sulfated threonine. Carboxyl side groups (e.g., aspartyl or glutamyl) can also be selectively modified by reaction with carbodiimides (R′—N—C—N—R′) such as, e.g., 1-cyclohexyl-3(2-morpholinyl-(4-ethyl) carbodiimide or 1-ethyl-3(4-azonia-4,4-dimetholpentyl) carbodiimide. Aspartyl or glutamyl can also be converted to asparaginyl and glutaminyl residues by reaction with ammonium ions. Mimetics of basic amino acids can be generated by substitution with, e.g., (in addition to lysine and arginine) the amino acids ornithine, citrulline, or (guanidino)-acetic acid, or (guanidino)alkyl-acetic acid, where alkyl is defined above. Nitrile derivative (e.g., containing the CN-moiety in place of COOH) can be substituted for asparagine or glutamine. Asparaginyl and glutaminyl residues can be deaminated to the corresponding aspartyl or glutamyl residues. Arginine residue mimetics can be generated by reacting arginyl with, e.g., one or more conventional reagents, including, e.g., phenylglyoxal, 2,3-butanedione, 1,2-cyclo-hexanedione, or ninhydrin, preferably under alkaline conditions. Tyrosine residue mimetics can be generated by reacting tyrosyl with, e.g., aromatic diazonium compounds or tetranitromethane. N-acetylimidizol and tetranitromethane can be used to form O-acetyl tyrosyl species and 3-nitro derivatives, respectively. Cysteine residue mimetics can be generated by reacting cysteinyl residues with, e.g., alpha-haloacetates such as 2-chloroacetic acid or chloroacetamide and corresponding amines; to give carboxymethyl or carboxyamidomethyl derivatives. Cysteine residue mimetics can also be generated by reacting cysteinyl residues with, e.g., bromo-trifluoroacetone, alpha-bromo-beta-(5-imidozoyl) propionic acid; chloroacetyl phosphate, N-alkylmaleimides, 3-nitro-2-pyridyl disulfide; methyl 2-pyridyl disulfide; p-chloromercuribenzoate; 2-chloromercuri-4 nitrophenol; or, chloro-7-nitrobenzo-oxa-1,3-diazole. Lysine mimetics can be generated (and amino terminal residues can be altered) by reacting lysinyl with, e.g., succinic or other carboxylic acid anhydrides. Lysine and other alpha-amino-containing residue mimetics can also be generated by reaction with imidoesters, such as methyl picolinimidate, pyridoxal phosphate, pyridoxal, chloroborohydride, trinitro-benzenesulfonic acid, O-methylisourea, 2,4, pentanedione, and transamidase-catalyzed reactions with glyoxylate. Mimetics of methionine can be generated by reaction with, e.g., methionine sulfoxide. Mimetics of proline include, e.g., pipecolic acid, thiazolidine carboxylic acid, 3- or 4-hydroxy proline, dehydroproline, 3- or 4-methylproline, or 3,3,-dimethylproline. Histidine residue mimetics can be generated by reacting histidyl with, e.g., diethylprocarbonate or para-bromophenacyl bromide. Other mimetics include, e.g., those generated by hydroxylation of proline and lysine; phosphorylation of the hydroxyl groups of seryl or threonyl residues; methylation of the alpha-amino groups of lysine, arginine and histidine; acetylation of the N-terminal amine; methylation of main chain amide residues or substitution with N-methyl amino acids; or amidation of C-terminal carboxyl groups.

[0397] A residue, e.g., an amino acid, of a polypeptide of the invention can also be replaced by an amino acid (or peptidomimetic residue) of the opposite chirality. Thus, any amino acid naturally occurring in the L-configuration (which can also be referred to as the Ror S, depending upon the structure of the chemical entity) can be replaced with the amino acid of the same chemical structural type or a peptidomimetic, but of the opposite chirality, referred to as the D-amino acid, but also can be referred to as the R- or S-form.

[0398] The invention also provides methods for modifying the polypeptides of the invention by either natural processes, such as post-translational processing (e.g., phosphorylation, acylation, etc), or by chemical modification techniques, and the resulting modified polypeptides. Modifications can occur anywhere in the polypeptide, including the peptide backbone, the amino acid side-chains and the amino or carboxyl termini. It will be appreciated that the same type of modification may be present in the same or varying degrees at several sites in a given polypeptide. Also a given polypeptide may have many types of modifications. Modifications include acetylation, acylation, ADP-ribosylation, amidation, covalent attachment of flavin, covalent attachment of a heme moiety, covalent attachment of a nucleotide or nucleotide derivative, covalent attachment of a lipid or lipid derivative, covalent attachment of a phosphatidylinositol, cross-linking cyclization, disulfide bond formation, demethylation, formation of covalent cross-links, formation of cysteine, formation of pyroglutamate, formylation, gamma-carboxylation, glycosylation, GPI anchor formation, hydroxylation, iodination, methylation, myristolyation, oxidation, pegylation, proteolytic processing, phosphorylation, prenylation, racemization, selenoylation, sulfation, and transfer-RNA mediated addition of amino acids to protein such as arginylation. See, e.g., Creighton, T. E., Proteins—Structure and Molecular Properties 2nd Ed., W.H. Freeman and Company, New York (1993); Posttranslational Covalent Modification of Proteins, B. C. Johnson, Ed., Academic Press, New York, pp. 1-1² (1983).

[0399] Solid-phase chemical peptide synthesis methods can also be used to synthesize the polypeptides, or fragments thereof, of the invention. Such method have been known in the art since the early 1960's (Merrifield, R. B., J. Am. Chem. Soc., 85:2149-2154, 1963) (See also Stewart, J. M. and Young, J. D., Solid Phase Peptide Synthesis, 2nd Ed., Pierce Chemical Co., Rockford, III., pp. 11-12)) and have recently been employed in commercially available laboratory peptide design and synthesis kits (Cambridge Research Biochemicals). Such commercially available laboratory kits have generally utilized the teachings of H. M. Geysen et al, Proc. Natl. Acad. Sci., USA, 81:3998 (1984) and provide for synthesizing peptides upon the tips of a multitude of “rods” or “pins” all of which are connected to a single plate. When such a system is utilized, a plate of rods or pins is inverted and inserted into a second plate of corresponding wells or reservoirs, which contain solutions for attaching or anchoring an appropriate amino acid to the pin's or rod's tips. By repeating such a process step, i.e., inverting and inserting the rod's and pin's tips into appropriate solutions, amino acids are built into desired peptides. In addition, a number of available FMOC peptide synthesis systems are available. For example, assembly of a polypeptide or fragment can be carried out on a solid support using an Applied Biosystems, Inc. Model 431A™ automated peptide synthesizer. Such equipment provides ready access to the peptides of the invention, either by direct synthesis or by synthesis of a series of fragments that can be coupled using other known techniques.

[0400] Enzymes of the Invention

[0401] The invention provides novel hydrolases, including esterases, acylases, lipases, phospholipases or proteases, e.g., proteins comprising at least about 50% sequence identity to an exemplary polypeptide of the invention, e.g., a protein having a sequence as set forth in SEQ ID NO:2, SEQ ID NO:4, SEQ ID NO:6, SEQ ID NO:8, etc., antibodies that bind them, and methods for making and using them. The polypeptides of the invention can have any hydrolase activity, e.g., an esterase, acylase, lipase, phospholipase or protease activity. In alternative aspects, an activity of an enzyme of the invention comprises hydrolysis or synthesis of lipids or oils. The hydrolases of the invention can modify oils by hydrolysis, alcoholysis, esterification, transesterification and/or interesterification, including “forced migration” reactions.

[0402] In alternative aspects, the hydrolases of the invention can have modified or new activities as compared to the exemplary hydrolases or the activities described herein. For example, the invention includes hydrolases with and without signal sequences and the signal sequences themselves. The invention includes immobilized hydrolases, anti-hydrolase antibodies and fragments thereof. The invention provides proteins for inhibiting hydrolase activity, e.g., antibodies that bind to the hydrolase active site. The invention includes homodimers and heterocomplexes, e.g., fusion proteins, heterodimers, etc., comprising the hydrolases of the invention. The invention includes hydrolases having activity over a broad range of high and low temperatures and pH's (e.g., acidic and basic aqueous conditions).

[0403] In one aspect, one or more hydrolases (e.g., lipases) of the invention is used for the biocatalytic synthesis of structured lipids, i.e., lipids that contain a defined set of fatty acids distributed in a defined manner on the glycerol backbone, including cocoa butter alternatives, poly-unsaturated fatty acids (PUFAs), 1,3-diacyl glycerides (DAGs), 2-monoglycerides (MAGs) and triacylglycerides (TAGs).

[0404] In one aspect, the invention provides methods of generating enzymes having altered (higher or lower) K_{cat}/Kₘ. In one aspect, site-directed mutagenesis is used to create additional hydrolase enzymes with alternative substrate specificities. The can be done, for example, by redesigning the substrate binding region or the active site of the enzyme. In one aspect, hydrolases of the invention are more stable at high temperatures, e.g., they are active under conditions of at least about 50° C., 60° C., 70° C., 75° C., 80° C., 85° C., 90° C., 95° C. or more, or between about 80° C. to 85° C. to 90° C. to 95° C., as compared to hydrolases from conventional or moderate organisms. In one aspect, hydrolases of the invention are stable after exposure to high temperatures, e.g., they are active after exposure to conditions of at least about 50° C., 60° C., 70° C., 75° C., 80° C., 85° C., 90° C., 95° C. or more, or between about 80° C. to 85° C. to 90° C. to 95° C.

[0405] Various proteins of the invention have a hydrolase activity, e.g., an esterase, acylase, lipase, phospholipase or protease activity, under various conditions. The invention provides methods of making hydrolases with different catalytic efficiency and stabilities towards temperature, oxidizing agents and pH conditions. These methods can use, e.g., the techniques of site-directed mutagenesis and/or random mutagenesis. In one aspect, directed evolution can be used to produce hydrolases with alternative specificities and stability.

[0406] The proteins of the invention are used in methods of the invention that can identify hydrolase modulators, e.g., activators or inhibitors. Briefly, test samples (e.g., compounds, such as members of peptide or combinatorial libraries, broths, extracts, and the like) are added to hydrolase assays to determine their ability to modulate, e.g., inhibit or activate, substrate cleavage. These inhibitors can be used in industry and research to reduce or prevent undesired isomerization. Modulators found using the methods of the invention can be used to alter (e.g., decrease or increase) the spectrum of activity of a hydrolase.

[0407] The invention also provides methods of discovering hydrolases using the nucleic acids, polypeptides and antibodies of the invention. In one aspect, lambda phage libraries are screened for expression-based discovery of hydrolases. In one aspect, the invention uses lambda phage libraries in screening to allow detection of toxic clones; improved access to substrate; reduced need for engineering a host, by-passing the potential for any bias resulting from mass excision of the library; and, faster growth at low clone densities. Screening of lambda phage libraries can be in liquid phase or in solid phase. In one aspect, the invention provides screening in liquid phase. This gives a greater flexibility in assay conditions; additional substrate flexibility; higher sensitivity for weak clones; and ease of automation over solid phase screening.

[0408] The invention provides screening methods using the proteins and nucleic acids of the invention involving robotic automation. This enables the execution of many thousands of biocatalytic reactions and screening assays in a short period of time, e.g., per day, as well as ensuring a high level of accuracy and reproducibility (see discussion of arrays, below). As a result, a library of derivative compounds can be produced in a matter of weeks.

[0409] The invention includes hydrolase enzymes which are non-naturally occurring hydrolases having a different hydrolase activity, stability, substrate specificity, pH profile and/or performance characteristic as compared to the non-naturally occurring hydrolase. These hydrolases have an amino acid sequence not found in nature. They can be derived by substitution of a plurality of amino acid residues of a precursor hydrolase with different amino acids. The precursor hydrolase may be a naturally-occurring hydrolase or a recombinant hydrolase. In one aspect, the hydrolase variants encompass the substitution of any of the naturally occurring L-amino acids at the designated amino acid residue positions.

[0410] Hydrolase Signal Sequences, Prepro and Catalytic Domains

[0411] The invention provides signal sequences (e.g., signal peptides (SPs)), prepro domains and catalytic domains (CDs). The SPs, prepro domains and/or CDs of the invention can be isolated or recombinant peptides or can be part of a fusion protein, e.g., as a heterologous domain in a chimeric protein. The invention provides nucleic acids encoding these catalytic domains (CDs), prepro domains and signal sequences (SPs, e.g., a peptide having a sequence comprising/consisting of amino terminal residues of a polypeptide of the invention). In one aspect, the invention provides a signal sequence comprising a peptide comprising/consisting of a sequence as set forth in residues 1 to 12, 1 to 13, 1 to 14, 1 to 15, 1 to 16, 1 to 17, 1 to 18, 1 to 19, 1 to 20, 1 to 21, 1 to 22, 1 to 23, 1 to 24, 1 to 25, 1 to 26, 1 to 27, 1 to 28, 1 to 28, 1 to 30, 1 to 31, 1 to 32, 1 to 33, 1 to 34, 1 to 35, 1 to 36, to 37, 1 to 38, Ito 39, 1 to 40, 1 to 41, 1 to 42, 1 to 43, 1 to 44 (or a longer peptide) of a polypeptide of the invention.

[0412] The hydrolase signal sequences (SPs), CDs, and/or prepro sequences of the invention can be isolated peptides, or, sequences joined to another hydrolase or a non-hydrolase polypeptide, e.g., as a fusion (chimeric) protein. In one aspect, the invention provides polypeptides comprising hydrolase signal sequences of the invention. In one aspect, polypeptides comprising hydrolase signal sequences SPs, CDs, and/or prepro of the invention comprise sequences heterologous to hydrolases of the invention (e.g., a fusion protein comprising an SP, CD, and/or prepro of the invention and sequences from another hydrolase or a non-hydrolase protein). In one aspect, the invention provides hydrolases of the invention with heterologous SPs, CDs, and/or prepro sequences, e.g., sequences with a yeast signal sequence. A hydrolase of the invention can comprise a heterologous SP and/or prepro in a vector, e.g., a pPIC series vector (Invitrogen, Carlsbad, Calif.).

[0413] In one aspect, SPs, CDs, and/or prepro sequences of the invention are identified following identification of novel hydrolase polypeptides. The pathways by which proteins are sorted and transported to their proper cellular location are often referred to as protein targeting pathways. One of the most important elements in all of these targeting systems is a short amino acid sequence at the amino terminus of a newly synthesized polypeptide called the signal sequence. This signal sequence directs a protein to its appropriate location in the cell and is removed during transport or when the protein reaches its final destination. Most lysosomal, membrane, or secreted proteins have an amino-terminal signal sequence that marks them for translocation into the lumen of the endoplasmic reticulum. The signal sequences can vary in length from 13 to 45 or more amino acid residues. Various methods of recognition of signal sequences are known to those of skill in the art. For example, in one aspect, novel hydrolase signal peptides are identified by a method referred to as SignalP. SignalP uses a combined neural network which recognizes both signal peptides and their cleavage sites. (Nielsen, et al., “Identification of prokaryotic and eukaryotic signal peptides and prediction of their cleavage sites.” Protein Engineering, vol. 10, no. 1, p. 1-6 (1997).

[0414] It should be understood that in some aspects hydrolases of the invention may not have SPs and/or prepro sequences, and/or catalytic domains (CDs). In one aspect, the invention provides polypeptides (e.g., hydrolases) lacking all or part of an SP, a CD and/or a prepro domain. In one aspect, the invention provides a nucleic acid sequence encoding a signal sequence (SP), a CD, and/or prepro from one hydrolase operably linked to a nucleic acid sequence of a different hydrolase or, optionally, a signal sequence (SPs) and/or prepro domain from a non-hydrolase protein may be desired.

[0415] The invention also provides isolated or recombinant polypeptides comprising signal sequences (SPs), prepro domain and/or catalytic domains (CDs) of the invention and heterologous sequences. The heterologous sequences are sequences not naturally associated (e.g., to a hydrolase) with an SP, prepro domain and/or CD. The sequence to which the SP, prepro domain and/or CD are not naturally associated can be on the SP's, prepro domain and/or CD's amino terminal end, carboxy terminal end, and/or on both ends of the SP and/or CD. In one aspect, the invention provides an isolated or recombinant polypeptide comprising (or consisting of) a polypeptide comprising a signal sequence (SP), prepro domain and/or catalytic domain (CD) of the invention with the proviso that it is not associated with any sequence to which it is naturally associated (e.g., hydrolase sequence). Similarly in one aspect, the invention provides isolated or recombinant nucleic acids encoding these polypeptides. Thus, in one aspect, the isolated or recombinant nucleic acid of the invention comprises coding sequence for a signal sequence (SP), prepro domain and/or catalytic domain (CD) of the invention and a heterologous sequence (i.e., a sequence not naturally associated with the a signal sequence (SP), prepro domain and/or catalytic domain (CD) of the invention). The heterologous sequence can be on the 3′ terminal end, 5′ terminal end, and/or on both ends of the SP, prepro domain and/or CD coding sequence.

[0416] The invention provides fusion of N-terminal or C-terminal subsequences of enzymes of the invention (e.g., signal sequences, prepro sequences) with other polypeptides, active proteins or protein fragments. The production of an enzyme of the invention (e.g., a hydrolase, e.g., a lipase such as a phospholipase) may also be accomplished by expressing the enzyme as an inactive fusion protein that is later activated by a proteolytic cleavage event (using either an endogenous or exogenous protease activity, e.g. trypsin) that results in the separation of the fusion protein partner and the mature enzyme, e.g., hydrolase of the invention. In one aspect, the fusion protein of the invention is expressed from a hybrid nucleotide construct that encodes a single open reading frame containing the following elements: the nucleotide sequence for the fusion protein, a linker sequence (defined as a nucleotide sequence that encodes a flexible amino acid sequence that joins two less flexible protein domains), protease cleavage recognition site, and the mature enzyme (e.g., any enzyme of the invention, e.g., a hydrolase) sequence. In alternative aspects, the fusion protein can comprise a pectate lyase sequence, a xylanase sequence, a phosphatidic acid phosphatase sequence, or another sequence, e.g., a sequence that has previously been shown to be over-expressed in a host system of interest. Any host system can be used (see discussion, above), for example, E. coli or Pichia pastoris. The arrangement of the nucleotide sequences in the chimeric nucleotide construction can be determined based on the protein expression levels achieved with each fusion construct. Proceeding from the 5′ end of the nucleotide construct to the 3′ prime end of the construct, in one aspect, the nucleotide sequences is assembled as follows: Signal sequence/fusion protein/linker sequence/protease cleavage recognition site/mature enzyme (e.g., any enzyme of the invention, e.g., a hydrolase) or Signal sequence/pro sequence/mature enzyme/linker sequence/fusion protein. The expression of enzyme (e.g., any enzyme of the invention, e.g., a hydrolase) as an inactive fusion protein may improve the overall expression of the enzyme's sequence, may reduce any potential toxicity associated with the overproduction of active enzyme and/or may increase the shelf life of enzyme prior to use because enzyme would be inactive until the fusion protein e.g. pectate lyase is separated from the enzyme, e.g., hydrolase of the invention.

[0417] In various aspects, the invention provides specific formulations for the activation of a hydrolase of the invention expressed as a fusion protein. In one aspect, the activation of the hydrolase activity initially expressed as an inactive fusion protein is accomplished using a proteolytic activity or potentially a proteolytic activity in combination with an amino-terminal or carboxyl-terminal peptidase (the peptidase can be an enzyme of the invention, or, another enzyme). This activation event may be accomplished in a variety of ways and at variety of points in the manufacturing/storage process prior to application in oil degumming. Exemplary processes of the invention include: Cleavage by an endogenous activity expressed by the manufacturing host upon secretion of the fusion construct into the fermentation media; Cleavage by an endogenous protease activity (which can be a protease of the invention) that is activated or comes in contact with intracellularly expressed fusion construct upon rupture of the host cells; Passage of the crude or purified fusion construct over a column of immobilized protease (which can be a protease of the invention) activity to accomplish cleavage and enzyme (e.g., hydrolase of the invention, e.g., a protease, lipase, esterase or phospholipase) activation prior to enzyme formulation; Treatment of the crude or purified fusion construct with a soluble source of proteolytic activity; Activation of a hydrolase (e.g., a hydrolase of the invention) at the oil refinery using either a soluble or insoluble source of proteolytic activity immediately prior to use in the process; and/or, Activation of the hydrolase (e.g., a hydrolase of the invention) activity by continuously circulating the fusion construct formulation through a column of immobilized protease activity at reduced temperature (for example, any between about 4° C. and 20° C.). This activation event may be accomplished prior to delivery to the site of use or it may occur on-site at the oil refinery.

[0418] Glycosylation

[0419] The peptides and polypeptides of the invention (e.g., hydrolases, antibodies) can also be glycosylated, for example, in one aspect, comprising at least one glycosylation site, e.g., an N-linked or O-linked glycosylation. In one aspect, the polypeptide can be glycosylated after being expressed in a P. pastoris or a S. pombe. The glycosylation can be added post-translationally either chemically or by cellular biosynthetic mechanisms, wherein the later incorporates the use of known glycosylation motifs, which can be native to the sequence or can be added as a peptide or added in the nucleic acid coding sequence.

[0420] Assays for Phospholipase Activity

[0421] The invention provides isolated or recombinant polypeptides having a phospholipase activity and nucleic acids encoding them. Any of the many phospholipase activity assays known in the art can be used to determine if a polypeptide has a phospholipase activity and is within the scope of the invention. Routine protocols for determining phospholipase A, B, D and C, patatin and lipid acyl hydrolase activities are well known in the art.

[0422] Exemplary activity assays include turbidity assays, methylumbelliferyl phosphocholine (fluorescent) assays, Amplex red (fluorescent) phospholipase assays, thin layer chromatography assays (TLC), cytolytic assays and p-nitrophenylphosphorylcholine assays. Using these assays polypeptides can be quickly screened for phospholipase activity.

[0423] The phospholipase activity can comprise a lipid acyl hydrolase (LAH) activity. See, e.g., Jimenez (2001) Lipids 36:1169-1174, describing an octaethylene glycol monododecyl ether-based mixed micellar assay for determining the lipid acyl hydrolase activity of a patatin. Pinsirodom (2000) J. Agric. Food Chem. 48:155-160, describes an exemplary lipid acyl hydrolase (LAH) patatin activity.

[0424] Turbidity assays to determine phospholipase activity are described, e.g., in Kauffmann (2001) “Conversion of Bacillus thermocatenulatus lipase into an efficient phospholipase with increased activity towards long-chain fatty acyl substrates by directed evolution and rational design,” Protein Engineering 14:919-928; Ibrahim (1995) “Evidence implicating phospholipase as a virulence factor of Candida albicans,” Infect. Immun. 63:1993-1998.

[0425] Methylumbelliferyl (fluorescent) phosphocholine assays to determine phospholipase activity are described, e.g., in Goode (1997) “Evidence for cell surface and internal phospholipase activity in ascidian eggs,” Develop. Growth Differ. 39:655-660; Diaz (1999) “Direct fluorescence-based lipase activity assay,” BioTechniques 27:696-700.

[0426] Amplex Red (fluorescent) Phospholipase Assays to determine phospholipase activity are available as kits, e.g., the detection of phosphatidylcholine-specific phospholipase using an Amplex Red phosphatidylcholine-specific phospholipase assay kit from Molecular Probes Inc. (Eugene, Oreg.), according to manufacturer's instructions. Fluorescence is measured in a fluorescence microplate reader using excitation at 560±10 nm and fluorescence detection at 590±10 nm. The assay is sensitive at very low enzyme concentrations.

[0427] Thin layer chromatography assays (TLC) to determine phospholipase activity are described, e.g., in Reynolds (1991) Methods in Enzymol. 197:3-13; Taguchi (1975) “Phospholipase from Clostridium novyi type A.I,” Biochim. Biophys. Acta 409:75-85. Thin layer chromatography (TLC) is a widely used technique for detection of phospholipase activity. Various modifications of this method have been used to extract the phospholipids from the aqueous assay mixtures. In some PLC assays the hydrolysis is stopped by addition of chloroform/methanol (2:1) to the reaction mixture. The unreacted starting material and the diacylglycerol are extracted into the organic phase and may be fractionated by TLC, while the head group product remains in the aqueous phase. For more precise measurement of the phospholipid digestion, radiolabeled substrates can be used (see, e.g., Reynolds (1991) Methods in Enzymol. 197:3-13). The ratios of products and reactants can be used to calculate the actual number of moles of substrate hydrolyzed per unit time. If all the components are extracted equally, any losses in the extraction will affect all components equally. Separation of phospholipid digestion products can be achieved by silica gel TLC with chloroform/methanol/water (65:25:4) used as a solvent system (see, e.g., Taguchi (1975) Biochim. Biophys. Acta 409:75-85).

[0428] p-Nitrophenylphosphorylcholine assays to determine phospholipase activity are described, e.g., in Korbsrisate (1999) J. Clin. Microbiol. 37:3742-3745; Berka (1981) Infect. Immun. 34:1071-1074. This assay is based on enzymatic hydrolysis of the substrate analog p-nitrophenylphosphorylcholine to liberate a yellow chromogenic compound p-nitrophenol, detectable at 405 nm. This substrate is convenient for high-throughput screening.

[0429] A cytolytic assay can detect phospholipases with cytolytic activity based on lysis of erythrocytes. Toxic phospholipases can interact with eukaryotic cell membranes and hydrolyze phosphatidylcholine and sphingomyelin, leading to cell lysis. See, e.g., Titball (1993) Microbiol. Rev. 57:347-366.

### Hybrid Hydrolases and Peptide Libraries

[0430] In one aspect, the invention provides hybrid hydrolases and fusion proteins, including peptide libraries, comprising sequences of the invention. The peptide libraries of the invention can be used to isolate peptide modulators (e.g., activators or inhibitors) of targets. The peptide libraries of the invention can be used to identify formal binding partners of targets, such as ligands, e.g., cytokines, hormones and the like.

[0431] In one aspect, the fusion proteins of the invention (e.g., the peptide moiety) are conformationally stabilized (relative to linear peptides) to allow a higher binding affinity for targets. The invention provides fusions of hydrolases of the invention and other peptides, including known and random peptides. They can be fused in such a manner that the structure of the hydrolases are not significantly perturbed and the peptide is metabolically or structurally conformationally stabilized. This allows the creation of a peptide library that is easily monitored both for its presence within cells and its quantity.

[0432] Amino acid sequence variants of the invention can be characterized by a predetermined nature of the variation, a feature that sets them apart from a naturally occurring form, e.g, an allelic or interspecies variation of a hydrolase sequence. In one aspect, the variants of the invention exhibit the same qualitative biological activity as the naturally occurring analogue. Alternatively, the variants can be selected for having modified characteristics. In one aspect, while the site or region for introducing an amino acid sequence variation is predetermined, the mutation per se need not be predetermined. For example, in order to optimize the performance of a mutation at a given site, random mutagenesis may be conducted at the target codon or region and the expressed hydrolase variants screened for the optimal combination of desired activity. Techniques for making substitution mutations at predetermined sites in DNA having a known sequence are well known, as discussed herein for example, M13 primer mutagenesis and PCR mutagenesis. Screening of the mutants can be done using assays of proteolytic activities. In alternative aspects, amino acid substitutions can be single residues; insertions can be on the order of from about 1 to 20 amino acids, although considerably larger insertions can be done. Deletions can range from about 1 to about 20, 30, 40, 50, 60, 70 residues or more. To obtain a final derivative with the optimal properties, substitutions, deletions, insertions or any combination thereof may be used. Generally, these changes are done on a few amino acids to minimize the alteration of the molecule. However, larger changes may be tolerated in certain circumstances.

[0433] The invention provides hydrolases where the structure of the polypeptide backbone, the secondary or the tertiary structure, e.g., an alpha-helical or beta-sheet structure, has been modified. In one aspect, the charge or hydrophobicity has been modified. In one aspect, the bulk of a side chain has been modified. Substantial changes in function or immunological identity are made by selecting substitutions that are less conservative. For example, substitutions can be made which more significantly affect: the structure of the polypeptide backbone in the area of the alteration, for example an alpha-helical or a beta-sheet structure; a charge or a hydrophobic site of the molecule, which can be at an active site; or a side chain. The invention provides substitutions in polypeptide of the invention where (a) a hydrophilic residues, e.g. seryl or threonyl, is substituted for (or by) a hydrophobic residue, e.g. leucyl, isoleucyl, phenylalanyl, valyl or alanyl; (b) a cysteine or proline is substituted for (or by) any other residue; (c) a residue having an electropositive side chain, e.g. lysyl, arginyl, or histidyl, is substituted for (or by) an electronegative residue, e.g. glutamyl or aspartyl; or (d) a residue having a bulky side chain, e.g. phenylalanine, is substituted for (or by) one not having a side chain, e.g. glycine. The variants can exhibit the same qualitative biological activity (i.e. hydrolase activity) although variants can be selected to modify the characteristics of the hydrolases as needed.

[0434] In one aspect, hydrolases of the invention comprise epitopes or purification tags, signal sequences or other fusion sequences, etc. In one aspect, the hydrolases of the invention can be fused to a random peptide to form a fusion polypeptide. By “fused” or “operably linked” herein is meant that the random peptide and the hydrolase are linked together, in such a manner as to minimize the disruption to the stability of the hydrolase structure, e.g., it retains hydrolase activity. The fusion polypeptide (or fusion polynucleotide encoding the fusion polypeptide) can comprise further components as well, including multiple peptides at multiple loops.

[0435] In one aspect, the peptides (e.g., hydrolase subsequences) and nucleic acids encoding them are randomized, either fully randomized or they are biased in their randomization, e.g. in nucleotide/residue frequency generally or per position. “Randomized” means that each nucleic acid and peptide consists of essentially random nucleotides and amino acids, respectively. In one aspect, the nucleic acids which give rise to the peptides can be chemically synthesized, and thus may incorporate any nucleotide at any position. Thus, when the nucleic acids are expressed to form peptides, any amino acid residue may be incorporated at any position. The synthetic process can be designed to generate randomized nucleic acids, to allow the formation of all or most of the possible combinations over the length of the nucleic acid, thus forming a library of randomized nucleic acids. The library can provide a sufficiently structurally diverse population of randomized expression products to affect a probabilistically sufficient range of cellular responses to provide one or more cells exhibiting a desired response. Thus, the invention provides an interaction library large enough so that at least one of its members will have a structure that gives it affinity for some molecule, protein, or other factor.

### Screening Methodologies and “On-Line” Monitoring Devices

[0436] In practicing the methods of the invention, a variety of apparatus and methodologies can be used to in conjunction with the polypeptides and nucleic acids of the invention, e.g., to screen polypeptides for hydrolase activity, to screen compounds as potential activators or inhibitors of a hydrolase activity (e.g., for potential drug screening), for antibodies that bind to a polypeptide of the invention, for nucleic acids that hybridize to a nucleic acid of the invention, to screen for cells expressing a polypeptide of the invention and the like. See, e.g., U.S. Pat. No. 6,337,187.

[0437] Capillary Arrays

[0438] Capillary arrays, such as the GIGAMATRIX™, Diversa Corporation, San Diego, Calif., can be used to in the methods of the invention. Nucleic acids or polypeptides of the invention can be immobilized to or applied to an array, including capillary arrays. Arrays can be used to screen for or monitor libraries of compositions (e.g., small molecules, antibodies, nucleic acids, etc.) for their ability to bind to or modulate the activity of a nucleic acid or a polypeptide of the invention. Capillary arrays provide another system for holding and screening samples. For example, a sample screening apparatus can include a plurality of capillaries formed into an array of adjacent capillaries, wherein each capillary comprises at least one wall defining a lumen for retaining a sample. The apparatus can further include interstitial material disposed between adjacent capillaries in the array, and one or more reference indicia formed within of the interstitial material. A capillary for screening a sample, wherein the capillary is adapted for being bound in an array of capillaries, can include a first wall defining a lumen for retaining the sample, and a second wall formed of a filtering material, for filtering excitation energy provided to the lumen to excite the sample.

[0439] A polypeptide or nucleic acid, e.g., a ligand or a substrate, can be introduced into a first component into at least a portion of a capillary of a capillary array. Each capillary of the capillary array can comprise at least one wall defining a lumen for retaining the first component. An air bubble can be introduced into the capillary behind the first component. A second component can be introduced into the capillary, wherein the second component is separated from the first component by the air bubble. A sample of interest can be introduced as a first liquid labeled with a detectable particle into a capillary of a capillary array, wherein each capillary of the capillary array comprises at least one wall defining a lumen for retaining the first liquid and the detectable particle, and wherein the at least one wall is coated with a binding material for binding the detectable particle to the at least one wall. The method can further include removing the first liquid from the capillary tube, wherein the bound detectable particle is maintained within the capillary, and introducing a second liquid into the capillary tube.

[0440] The capillary array can include a plurality of individual capillaries comprising at least one outer wall defining a lumen. The outer wall of the capillary can be one or more walls fused together. Similarly, the wall can define a lumen that is cylindrical, square, hexagonal or any other geometric shape so long as the walls form a lumen for retention of a liquid or sample. The capillaries of the capillary array can be held together in close proximity to form a planar structure. The capillaries can be bound together, by being fused (e.g., where the capillaries are made of glass), glued, bonded, or clamped side-by-side. The capillary array can be formed of any number of individual capillaries, for example, a range from 100 to 4,000,000 capillaries. A capillary array can form a micro titer plate having about 100,000 or more individual capillaries bound together.

[0441] Arrays, or “Biochips”

[0442] Nucleic acids or polypeptides of the invention can be immobilized to or applied to an array. Arrays can be used to screen for or monitor libraries of compositions (e.g., small molecules, antibodies, nucleic acids, etc.) for their ability to bind to or modulate the activity of a nucleic acid or a polypeptide of the invention. For example, in one aspect of the invention, a monitored parameter is transcript expression of a hydrolase gene. One or more, or, all the transcripts of a cell can be measured by hybridization of a sample comprising transcripts of the cell, or, nucleic acids representative of or complementary to transcripts of a cell, by hybridization to immobilized nucleic acids on an array, or “biochip.” By using an “array” of nucleic acids on a microchip, some or all of the transcripts of a cell can be simultaneously quantified. Alternatively, arrays comprising genomic nucleic acid can also be used to determine the genotype of a newly engineered strain made by the methods of the invention. Polypeptide arrays” can also be used to simultaneously quantify a plurality of proteins. The present invention can be practiced with any known “array,” also referred to as a “microarray” or “nucleic acid array” or “polypeptide array” or “antibody array” or “biochip,” or variation thereof. Arrays are generically a plurality of “spots” or “target elements,” each target element comprising a defined amount of one or more biological molecules, e.g., oligonucleotides, immobilized onto a defined area of a substrate surface for specific binding to a sample molecule, e.g., mRNA transcripts.

[0443] In one aspect, the hydrolases are used as immobilized forms. Any immobilization method can be used, e.g., immobilization upon an inert support such as diethylaminoethyl-cellulose, porous glass, chitin or cells. Cells that express hydrolases of the invention can be immobilized by cross-linking, e.g. with glutaraldehyde to a substrate surface.

[0444] In practicing the methods of the invention, any known array and/or method of making and using arrays can be incorporated in whole or in part, or variations thereof, as described, for example, in U.S. Pat. Nos. 6,277,628; 6,277,489; 6,261,776; 6,258,606; 6,054,270; 6,048,695; 6,045,996; 6,022,963; 6,013,440; 5,965,452; 5,959,098; 5,856,174; 5,830,645; 5,770,456; 5,632,957; 5,556,752; 5,143,854; 5,807,522; 5,800,992; 5,744,305; 5,700,637; 5,556,752; 5,434,049; see also, e.g., WO 99/51773; WO 99/09217; WO 97/46313; WO 96/17958; see also, e.g., Johnston (1998) Curr. Biol. 8:R171-R174; Schummer (1997) Biotechniques 23:1087-1092; Kern (1997) Biotechniques 23:120-124; Solinas-Toldo (1997) Genes, Chromosomes & Cancer 20:399-407; Bowtell (1999) Nature Genetics Supp. 21:25-32. See also published U.S. patent applications Nos. 20010018642; 20010019827; 20010016322; 20010014449; 20010014448; 20010012537; 20010008765.

[0445] Antibodies and Antibody-Based Screening Methods

[0446] The invention provides isolated or recombinant antibodies that specifically bind to a hydrolase of the invention. These antibodies can be used to isolate, identify or quantify the hydrolase of the invention or related polypeptides. These antibodies can be used to isolate other polypeptides within the scope the invention or other related hydrolases.

[0447] The term “antibody” includes a peptide or polypeptide derived from, modeled after or substantially encoded by an immunoglobulin gene or immunoglobulin genes, or fragments thereof, capable of specifically binding an antigen or epitope, see, e.g. Fundamental Immunology, Third Edition, W. E. Paul, ed., Raven Press, N.Y. (1993); Wilson (1994) J. Immunol. Methods 175:267-273; Yarmush (1992) J. Biochem. Biophys. Methods 25:85-97. The term antibody includes antigen-binding portions, i.e., “antigen binding sites,” (e.g., fragments, subsequences, complementarity determining regions (CDRs)) that retain capacity to bind antigen, including (i) a Fab fragment, a monovalent fragment consisting of the VL, VH, CL and CH1 domains; (ii) a F(ab′)2 fragment, a bivalent fragment comprising two Fab fragments linked by a disulfide bridge at the hinge region; (iii) a Fd fragment consisting of the VH and CH1 domains; (iv) a Fv fragment consisting of the VL and VH domains of a single arm of an antibody, (v) a dAb fragment (Ward et al., (1989) Nature 341:544-546), which consists of a VH domain; and (vi) an isolated complementarity determining region (CDR). Single chain antibodies are also included by reference in the term “antibody.” Thus, the invention provides antibodies, including antigen binding sites and single chain antibodies that specifically bind to a hydrolase of the invention. In practicing the methods of the invention, polypeptides having a hydrolase activity can also be used.

[0448] The antibodies can be used in immunoprecipitation, staining, immunoaffinity columns, and the like. If desired, nucleic acid sequences encoding for specific antigens can be generated by immunization followed by isolation of polypeptide or nucleic acid, amplification or cloning and immobilization of polypeptide onto an array of the invention. Alternatively, the methods of the invention can be used to modify the structure of an antibody produced by a cell to be modified, e.g., an antibody's affinity can be increased or decreased. Furthermore, the ability to make or modify antibodies can be a phenotype engineered into a cell by the methods of the invention.

[0449] Methods of immunization, producing and isolating antibodies (polyclonal and monoclonal) are known to those of skill in the art and described in the scientific and patent literature, see, e.g., Coligan, CURRENT PROTOCOLS IN IMMUNOLOGY, Wiley/Greene, N.Y. (1991); Stites (eds.) BASIC AND CLINICAL IMMUNOLOGY (7th ed.) Lange Medical Publications, Los Altos, Calif. (“Stites”); Goding, MONOCLONAL ANTIBODIES: PRINCIPLES AND PRACTICE (2d ed.) Academic Press, New York, N.Y. (1986); Kohler (1975) Nature 256:495; Harlow (1988) ANTIBODIES, A LABORATORY MANUAL, Cold Spring Harbor Publications, New York. Antibodies also can be generated in vitro, e.g., using recombinant antibody binding site expressing phage display libraries, in addition to the traditional in vivo methods using animals. See, e.g., Hoogenboom (1997) Trends Biotechnol. 15:62-70; Katz (1997) Annu. Rev. Biophys. Biomol. Struct. 26:27-45.

[0450] Polypeptides or peptides can be used to generate antibodies, which bind specifically to the polypeptides of the invention. The resulting antibodies may be used in immunoaffinity chromatography procedures to isolate or purify the polypeptide or to determine whether the polypeptide is present in a biological sample. In such procedures, a protein preparation, such as an extract, or a biological sample is contacted with an antibody capable of specifically binding to one of the polypeptides of the invention.

[0451] In immunoaffinity procedures, the antibody is attached to a solid support, such as a bead or other column matrix. The protein preparation is placed in contact with the antibody under conditions in which the antibody specifically binds to one of the polypeptides of the invention. After a wash to remove non-specifically bound proteins, the specifically bound polypeptides are eluted.

[0452] The ability of proteins in a biological sample to bind to the antibody may be determined using any of a variety of procedures familiar to those skilled in the art. For example, binding may be determined by labeling the antibody with a detectable label such as a fluorescent agent, an enzymatic label, or a radioisotope. Alternatively, binding of the antibody to the sample may be detected using a secondary antibody having such a detectable label thereon. Particular assays include ELISA assays, sandwich assays, radioimmunoassays, and Western Blots.

[0453] Polyclonal antibodies generated against the polypeptides of the invention can be obtained by direct injection of the polypeptides into an animal or by administering the polypeptides to a non-human animal. The antibody so obtained will then bind the polypeptide itself. In this manner, even a sequence encoding only a fragment of the polypeptide can be used to generate antibodies which may bind to the whole native polypeptide. Such antibodies can then be used to isolate the polypeptide from cells expressing that polypeptide.

[0454] For preparation of monoclonal antibodies, any technique which provides antibodies produced by continuous cell line cultures can be used. Examples include the hybridoma technique, the trioma technique, the human B-cell hybridoma technique, and the EBV-hybridoma technique (see, e.g., Cole (1985) in Monoclonal Antibodies and Cancer Therapy, Alan R. Liss, Inc., pp. 77-96).

[0455] Techniques described for the production of single chain antibodies (see, e.g., U.S. Pat. No. 4,946,778) can be adapted to produce single chain antibodies to the polypeptides of the invention. Alternatively, transgenic mice may be used to express humanized antibodies to these polypeptides or fragments thereof.

[0456] Antibodies generated against the polypeptides of the invention (including anti-idiotype antibodies) may be used in screening for similar polypeptides from other organisms and samples. In such techniques, polypeptides from the organism are contacted with the antibody and those polypeptides which specifically bind the antibody are detected. Any of the procedures described above may be used to detect antibody binding.

[0457] Immobilized Hydrolases

[0458] In one aspect, the hydrolase of the invention, e.g., esterases, acylases, lipases, phospholipases or proteases, are used as immobilized forms, e.g., to process lipids, in the structured synthesis of lipids, to digest proteins and the like. The immobilized lipases of the invention can be used, e.g., for hydrolysis of triglycerides (e.g., palmitic, oleic, linoleic, linolenic and pinolenic), diglycerides or esters or for the esterification or transesterification of fatty acids, diglycerides or triglycerides, or in the interesterification of fats. In one aspect, the lipase is specific for esterification of fatty acids with alcohol, 1,3-specific or randomizing transesterification lipase or lipase specific for the hydrolysis of partial glycerides, esters or triglycerides. Immobilized lipase of the invention can be used in a packed bed for continuous transesterification of solvent free fats. See, e.g., U.S. Pat. Nos. 4,818,695; 5,569,594.

[0459] Any immobilization method or form of support can be used, e.g., arrays, beads, capillary supports and the like, as described above. In one aspect, hydrolase immobilization can occur upon an inert support such as diethylaminoethyl-cellulose, porous glass, chitin or cells. Cells that express hydrolases of the invention can be immobilized by cross-linking, e.g. with glutaraldehyde to a substrate surface. Immobilized hydrolases of the invention can be prepared containing hydrolase bound to a dry, porous particulate hydrophobic support, with a surfactant, such as a polyoxyethylene sorbitan fatty acid ester or a polyglycerol fatty acid ester. The support can be an aliphatic olefinic polymer, such as a polyethylene or a polypropylene, a homo- or copolymer of styrene or a blend thereof or a pre-treated inorganic support. These supports can be selected from aliphatic olefinic polymers, oxidation polymers, blends of these polymers or pre-treated inorganic supports in order to make these supports hydrophobic. This pre-treatment can comprise silanization with an organic silicon compound. The inorganic material can be a silica, an alumina, a glass or a ceramic. Supports can be made from polystyrene, copolymers of styrene, polyethylene, polypropylene or from co-polymers derived from (meth)acrylates. See, e.g., U.S. Pat. No. 5,773,266.

[0460] The terms “array” or “microarray” or “biochip” or “chip” as used herein is a plurality of target elements, each target element comprising a defined amount of one or more polypeptides (including antibodies) or nucleic acids immobilized onto a defined area of a substrate surface, as discussed in further detail, below.

### Kits

[0461] The invention provides kits comprising the compositions, e.g., nucleic acids, expression cassettes, vectors, cells, transgenic seeds or plants or plant parts, polypeptides (e.g., hydrolases) and/or antibodies of the invention. The kits also can contain instructional material teaching the methodologies and industrial uses of the invention, as described herein.

### Measuring Metabolic Parameters

[0462] The methods of the invention provide whole cell evolution, or whole cell engineering, of a cell to develop a new cell strain having a new phenotype by modifying the genetic composition of the cell, where the genetic composition is modified by addition to the cell of a nucleic acid, e.g., a hydrolase-encoding nucleic acid of the invention. To detect the new phenotype, at least one metabolic parameter of a modified cell is monitored in the cell in a “real time” or “on-line” time frame. In one aspect, a plurality of cells, such as a cell culture, is monitored in “real time” or “on-line.” In one aspect, a plurality of metabolic parameters is monitored in “real time” or “on-line.” Metabolic parameters can be monitored using the fluorescent polypeptides of the invention (e.g., hydrolases of the invention comprising a fluorescent moiety).

[0463] Metabolic flux analysis (MFA) is based on a known biochemistry framework. A linearly independent metabolic matrix is constructed based on the law of mass conservation and on the pseudo-steady state hypothesis (PSSH) on the intracellular metabolites. In practicing the methods of the invention, metabolic networks are established, including the:
[0464] identity of all pathway substrates, products and intermediary metabolites
[0465] identity of all the chemical reactions interconverting the pathway metabolites, the stoichiometry of the pathway reactions,
[0466] identity of all the enzymes catalyzing the reactions, the enzyme reaction kinetics,
[0467] the regulatory interactions between pathway components, e.g. allosteric interactions, enzyme-enzyme interactions etc,
[0468] intracellular compartmentalization of enzymes or any other supramolecular organization of the enzymes, and,
[0469] the presence of any concentration gradients of metabolites, enzymes or effector molecules or diffusion barriers to their movement.

[0470] Once the metabolic network for a given strain is built, mathematic presentation by matrix notion can be introduced to estimate the intracellular metabolic fluxes if the on-line metabolome data is available. Metabolic phenotype relies on the changes of the whole metabolic network within a cell. Metabolic phenotype relies on the change of pathway utilization with respect to environmental conditions, genetic regulation, developmental state and the genotype, etc. In one aspect of the methods of the invention, after the on-line MFA calculation, the dynamic behavior of the cells, their phenotype and other properties are analyzed by investigating the pathway utilization. For example, if the glucose supply is increased and the oxygen decreased during the yeast fermentation, the utilization of respiratory pathways will be reduced and/or stopped, and the utilization of the fermentative pathways will dominate. Control of physiological state of cell cultures will become possible after the pathway analysis. The methods of the invention can help determine how to manipulate the fermentation by determining how to change the substrate supply, temperature, use of inducers, etc. to control the physiological state of cells to move along desirable direction. In practicing the methods of the invention, the MFA results can also be compared with transcriptome and proteome data to design experiments and protocols for metabolic engineering or gene shuffling, etc.

[0471] In practicing the methods of the invention, any modified or new phenotype can be conferred and detected, including new or improved characteristics in the cell. Any aspect of metabolism or growth can be monitored.

[0472] Monitoring Expression of an mRNA Transcript

[0473] In one aspect of the invention, the engineered phenotype comprises increasing or decreasing the expression of an mRNA transcript or generating new transcripts in a cell. This increased or decreased expression can be traced by use of a hydrolase-encoding nucleic acid of the invention. mRNA transcripts, or messages, also can be detected and quantified by any method known in the art, including, e.g., Northern blots, quantitative amplification reactions, hybridization to arrays, and the like. Quantitative amplification reactions include, e.g., quantitative PCR, including, e.g., quantitative reverse transcription polymerase chain reaction, or RT-PCR; quantitative real time RT-PCR, or “real-time kinetic RT-PCR” (see, e.g., Kreuzer (2001) Br. J. Haematol. 114:313-318; Xia (2001) Transplantation 72:907-914).

[0474] In one aspect of the invention, the engineered phenotype is generated by knocking out expression of a homologous gene. The gene's coding sequence or one or more transcriptional control elements can be knocked out, e.g., promoters or enhancers. Thus, the expression of a transcript can be completely ablated or only decreased.

[0475] In one aspect of the invention, the engineered phenotype comprises increasing the expression of a homologous gene. This can be effected by knocking out of a negative control element, including a transcriptional regulatory element acting in cis- or trans-, or, mutagenizing a positive control element. One or more, or, all the transcripts of a cell can be measured by hybridization of a sample comprising transcripts of the cell, or, nucleic acids representative of or complementary to transcripts of a cell, by hybridization to immobilized nucleic acids on an array.

[0476] Monitoring Expression of a Polypeptides, Peptides and Amino Acids

[0477] In one aspect of the invention, the engineered phenotype comprises increasing or decreasing the expression of a polypeptide or generating new polypeptides in a cell. This increased or decreased expression can be traced by use of a hydrolase or an antibody of the invention. Polypeptides, peptides and amino acids also can be detected and quantified by any method known in the art, including, e.g., nuclear magnetic resonance (NMR), spectrophotometry, radiography (protein radiolabeling), electrophoresis, capillary electrophoresis, high performance liquid chromatography (HPLC), thin layer chromatography (TLC), hyperdiffusion chromatography, various immunological methods, e.g. immunoprecipitation, immunodiffusion, immuno-electrophoresis, radioimmunoassays (RIAs), enzyme-linked immunosorbent assays (ELISAs), immuno-fluorescent assays, gel electrophoresis (e.g., SDS-PAGE), staining with antibodies, fluorescent activated cell sorter (FACS), pyrolysis mass spectrometry, Fourier-Transform Infrared Spectrometry, Raman spectrometry, GC-MS, and LC-Electrospray and cap-LC-tandem-electrospray mass spectrometries, and the like. Novel bioactivities can also be screened using methods, or variations thereof, described in U.S. Pat. No. 6,057,103. Furthermore, as discussed below in detail, one or more, or, all the polypeptides of a cell can be measured using a protein array.

### Applications—Industrial, Medical, Experimental, Food and Feed Processing

[0478] Polypeptides (including enzymes and antibodies) and nucleic acids of the invention can be used for a variety of industrial, experimental, food and feed processing, nutritional and pharmaceutical applications, e.g., for food and feed supplements, colorants, neutraceuticals, cosmetic and pharmaceutical needs. In one aspect, the hydrolases of the invention have a lipase activity capable of hydrolyzing both sterol esters and triglycerides; in one aspect, these polypeptides are used in paper processing, e.g., to make an “improved” or stronger paper, including paper processing methods for improving paper strength.

[0479] The invention provides many industrial uses and medical applications for the hydrolases (e.g., lipases, phospholipases, esterases, proteases) of the invention, and a few exemplary uses and compositions of the invention are described below. For example, the invention provides methods for hydrolyzing steryl esters and triglycerides (e.g., lipophilic extracts comprising steryl esters and triglycerides, including palmitic, oleic, linoleic, linolenic and pinolenic, as present in a paper pulp, including a kraft pulp), into sterols, glycerol and free fatty acids, using enzyme(s) of the invention. Thus, the invention provides methods for decreasing the amount, or the content of, steryl esters and triglycerides in a composition. Similarly, the invention provides methods for generating a sterol, a glycerol or a free fatty acid by hydrolyzing a composition comprising a cellulose or a lipophilic compound with an enzyme of the invention.

[0480] In another aspect, the processes of the invention comprise converting a non-hydratable phospholipid to a hydratable form, oil degumming, food processing, processing of oils from plants, fish, algae and the like, to name just a few applications.

### Phospholipases

[0481] The invention provides hydrolases having phospholipase activity, and these enzymes, e.g., lipases and phospholipases of the invention, e.g., phospholipases A, B, C and D, have many industrial uses and medical applications. Methods of using phospholipase enzymes in industrial applications are well known in the art. For example, the phospholipases and methods of the invention can be used for the processing of fats and oils as described, e.g., in JP Patent Application Publication H6-306386, describing converting phospholipids present in the oils and fats into water-soluble substances containing phosphoric acid groups.

[0482] Phospholipases of the invention can be used to process plant oils and phospholipids such as those derived from or isolated from rice bran, soy, canola, palm, cottonseed, corn, palm kernel, coconut, peanut, sesame, sunflower. Phospholipases of the invention can be used to process essential oils, e.g., those from fruit seed oils, e.g., grapeseed, apricot, borage, etc. Phospholipases of the invention can be used to process oils and phospholipids in different forms, including crude forms, degummed, gums, wash water, clay, silica, soapstock, and the like. The phospholipids of the invention can be used to process high phosphorous oils, fish oils, animal oils, plant oils, algae oils and the like. In any aspect of the invention, any time a phospholipase C can be used, an alternative comprises use of a phospholipase D of the invention and a phosphatase (e.g., using a PLD/phosphatase combination to improve yield in a high phosphorus oil, such as a soy bean oil).

[0483] In one aspect, the invention provides compositions and methods (which can comprise use of phospholipases of the invention) for oil degumming comprising using varying amounts of acid and base without making soapstock. Using this aspect of the invention for oil degumming, acid (including phosphoric and/or citric) can be used to hydrate non-hydratable phospholipids in high phosphorous oils (including, e.g., rice bran, soybean, canola, and sunflower). Once the phospholipids are hydrated, the pH of the aqueous phase can be raised using caustic addition: the amount of caustic added can create a favorable pH for enzyme activity but will not result in the formation of a significant soapstock fraction in the oil. Because a soapstock is not formed, the free fatty acids in the oil can be removed downstream, following the degumming step, during bleaching and deodorization.

[0484] Phospholipases of the invention can be used to process and make edible oils, biodiesel oils, liposomes for pharmaceuticals and cosmetics, structured phospholipids and structured lipids. Phospholipases of the invention can be used in oil extraction. Phospholipases of the invention can be used to process and make various soaps.

[0485] The phospholipases of the invention can also be used to study the phosphoinositide (PI) signaling system; in the diagnosis, prognosis and development of treatments for bipolar disorders (see, e.g., Pandey (2002) Neuropsychopharmacology 26:216-228); as antioxidants; as modified phospholipids; as foaming and gelation agents; to generate angiogenic lipids for vascularizing tissues; to identify phospholipase, e.g., PLA, PLB, PLC, PLD and/or patatin modulators (agonists or antagonists), e.g., inhibitors for use as anti-neoplastics, anti-inflammatory and as analgesic agents. They can be used to generate acidic phospholipids for controlling the bitter taste in food and pharmaceuticals. They can be used in fat purification. They can be used to identify peptides inhibitors for the treatment of viral, inflammatory, allergic and cardiovascular diseases. They can be used to make vaccines. They can be used to make polyunsaturated fatty acid glycerides and phosphatidylglycerols.

[0486] The phospholipases of the invention, for example PLA and PLC enzymes, are used to generate immunotoxins and various therapeutics for anti-cancer treatments.

[0487] The phospholipases of the invention can be used in conjunction with other enzymes for decoloring (i.e. chlorophyll removal) and in detergents (see above), e.g., in conjunction with other enzymes (e.g., lipases, proteases, esterases, phosphatases). For example, in any instance where a PLC is used, a PLD and a phosphatase may be used in combination, to produce the same result as a PLC alone.

[0488] Detoxification

[0489] The hydrolases (e.g., lipases, esterase, protease and/or phospholipases) of the invention can be used in detoxification processes, e.g., for the detoxification of endotoxins, e.g., compositions comprising lipopolysaccharides (LPS), and, the invention provides detoxification processes using at least one enzyme of the invention, e.g., a hydrolase having a sequence as set forth in SEQ ID NO:962 (encoded by SEQ ID NO:961), or SEQ ID NO:966 (encoded by SEQ ID NO:965). In one aspect, a lipase and/or an esterase of the invention is used to detoxify a lipopolysaccharide (LPS). In one aspect, this detoxification is by deacylation of 2′ and/or 3′ fatty acid chains from lipid A. In one aspect, a hydrolase (e.g., a lipase and/or an esterase) of the invention is used to hydrolyze a 2′-lauroyl and/or a 3′-myristoyl chain from a lipid, e.g., a lipid A (e.g., from a bacterial endotoxin). In one aspect, the process of the invention is used to destroy an endotoxin, e.g., a toxin from a gram negative bacteria, as from E. coli. In one aspect, a hydrolase (e.g., a lipase and/or an esterase) of the invention is used to ameliorate the effects of toxin poisoning (e.g., from an on-going gram negative infection), or, to prophylactically to prevent the effects of endotoxin during an infection (e.g., an infection in an animal or a human). Accordingly, the invention provides a pharmaceutical composition comprising a hydrolase (e.g., a lipase and/or an esterase) of the invention, and method using a hydrolase of the invention, for the amelioration or prevention of lipopolysaccharide (LPS) toxic effects, e.g., during sepsis.

[0490] Processing Foods

[0491] The hydrolases, e.g., lipases, esterases, proteases and/or phospholipases of the invention, or a combination thereof, can be used to process foods, e.g., to change their stability, shelf-life, flavor, texture and the like. For example, in one aspect, phospholipases of the invention are used to generate acidic phospholipids for controlling bitter taste in foods.

[0492] In one aspect, the invention provides cheese-making processes using hydrolases (e.g., lipases, esterases, proteases, phospholipases) of the invention (and, thus, the invention also provides cheeses comprising hydrolases of the invention). In one aspect, the enzymes of the invention (e.g., lipases, esterases, proteases, phospholipases, e.g., phospholipase A, lysophospholipase or a combination thereof) are used to process cheeses for flavor enhancement, to increase yield and/or for “stabilizing” cheeses, e.g., by reducing the tendency for “oil-off,” or, in one aspect, the enzymes of the invention are used to produce cheese from cheese milk. These processes of the invention can incorporate any method or protocol, e.g., as described, e.g., in U.S. Pat. Nos. 6,551,635, and 6,399,121, WO 03/070013, WO 00/054601. For example, in one aspect, hydrolases (e.g., lipases, esterases, proteases and/or phospholipases) of the invention are used to stabilize fat emulsion in milk or milk-comprising compositions, e.g. cream, and are used to stabilize milk compositions, e.g. for the manufacturing of creams or cream liquors. In one aspect, the invention provides a process for enhancing the favor of a cheese using at least one enzyme of the invention, the process comprising incubating a protein, a fat and a protease (e.g., of the invention) and a lipase (e.g., of the invention) in an aqueous medium under conditions that produce an enhanced cheese flavor (e.g., reduced bitterness), e.g., as described in WO 99/66805. In one aspect, phospholipases of the invention are used to enhance flavor in a cheese (e.g., a curd) by mixing with water, a protease (e.g., of the invention), and a lipase (e.g., of the invention) at an elevated temperature, e.g., between about 75° C. to 95° C., as described, e.g., in U.S. Pat. No. 4,752,483. In one aspect, phospholipases of the invention are used to accelerate cheese aging by adding an enzyme of the invention to a cheese (e.g., a cheese milk) before adding a coagulant to the milk, or, adding an enzyme (e.g., a lipase or a phospholipase) of the invention to a curd with salt before pressing, e.g., as described, e.g., in U.S. Pat. No. 4,707,364. In one aspect, a lipase of the invention is used degrade a triglyceride in milk fat to liberate free fatty acids, resulting in flavor enhancement. A protease of the invention also can be used in any of these processes of the invention, see, e.g., Brindisi (2001) J. of Food Sci. 66:1100-1107.

[0493] In one aspect, a hydrolase (e.g., lipases, esterase, protease and/or phospholipase of the invention) is used to reduce the content of phosphorus components in a food, e.g., an oil, such as a vegetable oil having a high non-hydratable phosphorus content, e.g., as described in WO 98/26057.

[0494] Caustic Refining

[0495] In one aspect, enzymes of the invention, e.g., phospholipases, lipases, esterases, proteases, are used as caustic refining aids. In one aspect, a PLC or PLD of the invention and a phosphatase are used in the processes as a drop-in, either before, during, or after a caustic neutralization refining process (either continuous or batch refining. The amount of enzyme added may vary according to the process. The water level used in the process should be low, e.g., about 0.5 to 5%. Alternatively, caustic is be added to the process multiple times. In addition, the process may be performed at different temperatures (25° C. to 70° C.), with different acids or caustics, and at varying pH (4-12). Acids that may be used in a caustic refining process include, but are not limited to, phosphoric, citric, ascorbic, sulfuric, fumaric, maleic, hydrochloric and/or acetic acids. Acids are used to hydrate non-hydratable phospholipids. Caustics that may be used include, but are not limited to, KOH- and NaOH. Caustics are used to neutralize free fatty acids. Alternatively, phospholipases of the invention, or more particularly a PLC or a PLD of the invention and a phosphatase, are used for purification of phytosterols from the gum/soapstock.

[0496] An alternate embodiment of the invention to add a phospholipase of the invention before caustic refining, e.g., by expressing the phospholipase in a plant. In another embodiment, the phospholipase of the invention is added during crushing of the plant, seeds or other plant part. Alternatively, the phospholipase of the invention is added following crushing, but prior to refining (i.e. in holding vessels). In addition, phospholipase is added as a refining pre-treatment, either with or without acid.

[0497] Another embodiment of the invention comprises adding a phospholipase of the invention during a caustic refining process. Levels of acid and caustic can be varied depending on the level of phosphorous and the level of free fatty acids. Broad temperature and pH ranges can be used in the process dependent upon the type of enzyme used.

[0498] In another embodiment of the invention, the phospholipase of the invention is added after caustic refining. In one aspect, the phospholipase is added in an intense mixer or in a retention mixer, prior to separation. Alternatively, the phospholipase is added following the heat step. In another embodiment, the phospholipase of the invention is added in the centrifugation step. In an additional embodiment, the phospholipase is added to the soapstock. Alternatively, the phospholipase is added to the washwater. In another instance, the phospholipase of the invention is added during the bleaching and/or deodorizing steps.

[0499] Structured Synthesis and Processing of Oils

[0500] The invention provides methods for the structured synthesis of oils, lipids and the like using hydrolases (e.g., lipases, phospholipases, esterases, proteases) of the invention. The methods of the invention comprise a biocatalytic synthesis of structured lipids, i.e., lipids that contain a defined set of fatty acids distributed in a defined manner on a backbone, e.g., a glycerol backbone. Products generated using the hydrolases of the invention and practicing the methods of the invention include cocoa butter alternatives, lipids containing poly-unsaturated fatty acids (PUFAs), 1,3-diacyl glycerides (DAGs), 2-monoacylglycerides (MAGs) and triacylglycerides (TAGs). The methods of the invention enable synthesis of lipids or fatty acids with defined regiospecificities and stereoselectivities.

[0501] The invention provides methods for processing (modifying) oils, lipids and the like using hydrolases of the invention. The methods of the invention can be used to process oils from plants, animals, microorganisms. The methods of the invention can be used in the structured synthesis of oils similar to those found in plants, animals, microorganisms. Lipids and oils can be processed to have a desired characteristic. Lipids and oils that can be processed by the methods of the invention (using the hydrolases of the invention) include cocoa butter alternatives, lipids containing poly-unsaturated fatty acids (PUFAs), 1,3-diacyl glycerides (DAGs), 2-monoacylglycerides (MAGs) and triacylglycerides (TAGs). In one aspect, the processed and synthetic oils and fats of the invention (e.g., cocoa butters alternatives and vegetable oils) can be used in a variety of applications, e.g., in the production of foods (e.g., confectionaries, pastries) and in the formulation of pharmaceuticals, nutraceuticals and cosmetics. In one aspect, the invention provides methods of processing fats and oils, e.g., oilseeds, from plants, including, e.g., rice bran, canola, sunflower, olive, palm, soy or lauric type oils using a hydrolase, e.g., a lipase, esterase or phospholipase, of the invention.

[0502] In one aspect, the invention provides methods of processing oils from animals, e.g., fish and mammals, using the hydrolases of the invention. In one aspect, the invention provides methods for the structured synthesis of oils similar to those found in animals, e.g., fish and mammals and microorganisms, using the hydrolases of the invention. In one aspect, these synthetic or processes oils are used as feed additives, foods, as ingredients in pharmaceutical formulations, nutraceuticals or in cosmetics. For example, in one aspect the hydrolases of the invention are used to make fish oil fatty acids as a feed additive. In one aspect, the hydrolases of the invention can be used to process oil from restaurant waste and rendered animal fats.

[0503] In one aspect, the hydrolases of the invention are versatile biocatalysts in organic synthesis, e.g., in the structured synthesis of oils, lipids and the like. Enzymes of the invention (including, e.g., esterases such as carboxyl esterases and lipases) can accept a broad range of substrates, including secondary and tertiary alcohols, e.g., from a natural product such as alpha-teipineol, linalool and the like. In some aspects, the hydrolases of the invention have good to excellent enantiospecificity (e.g., stereospecificity).

[0504] In one aspect, the hydrolase of the invention comprises a GGGX motif. As discussed above, in one aspect, the invention provides a fragment or subsequence of an enzyme of the invention comprising a catalytic domain (“CD”) or “active site.” In one aspect, the catalytic domain (“CD”)- or “active site”-comprising peptide, catalytic antibody or polypeptide of the invention comprises a GGGX motif. In one aspect, this motif is located on a protein loop near the binding site of the substrate ester's carboxylic group. In one aspect, the GGGX motif is involved in the formation of an “oxyanion hole” which stabilizes the anionic carbonyl oxygen of a tetrahedral intermediate during the catalytic cycle of ester hydrolysis. In one aspect, the invention provides an esterase or a lipase comprising a GGGX motif for the hydrolysis of a tertiary alcohol ester. In one aspect, the invention provides an esterase or a lipase for the hydrolysis of a terpinyl-, linalyl, 2-phenyl-3-butin-2-yl acetate and/or a 3-methyl-1-pentin-3-yl-acetate, wherein the enzyme of the invention comprises a GGGX motif.

[0505] In one aspect, the invention provides an oil. (e.g., vegetable oils, cocoa butters, and the like) conversion process comprising at least one enzyme (e.g., a lipase) of the invention. In one aspect, an oil conversion process comprises a controlled hydrolysis and acylation, e.g., a glycerol acylation, which can result in high purity and a broad end of products. In one aspect, hydrolases (e.g., lipases) of the invention are used to produce diacylglycerol oils and structured nutritional oils. In one aspect, the invention provides processes for the esterification of propylene glycol using an enzyme of the invention, e.g., a regio- and/or chemo-selective lipase for mono-substituted esterification at the sn-1 position. In one aspect, the invention provides processes for the structured synthesis of oils with targeted saturated or unsaturated fatty acid profiles using an enzyme of the invention, e.g., a regio- and/or chemo-selective lipase for the removal of a saturated fatty acid, or, for the targeted addition of a fatty acid to a glycerol backbone. In one aspect, the invention provides processes for modifying saturated fatty acids using an enzyme of the invention, e.g., by adding double bonds using an enzyme with desaturase activity (in one aspect, this process is done in whole cell systems). In one aspect, the invention provides processes for modifying saturated fatty acids using an enzyme of the invention, e.g., by the removal double bonds using enzymes with hydrogenation and/or dehydrogenation activity (in one aspect, this process is done in whole cell systems). In one aspect, the invention provides processes for the total hydrolysis of triglycerides without trans-isomer formation using an enzyme of the invention, e.g., a non-selective lipase of the invention for total hydrolysis without formation of trans-isomers. In one aspect, the invention provides processes for enzyme catalyzed monoesterification of a glycol, e.g., a propylene glycol, using a hydrolase (e.g., a lipase, an esterase) of the invention. In one aspect, oleic, linoleic or alpha-linolenic acids are used in the enzyme catalyzed monoesterification. Any oil, e.g., a vegetable oil such as soy, cotton, corn, rice bran or sunflower can be used in this process. The enzyme can be chemoselective and/or enantioselective. For example, in one aspect, a chemoselective enzyme of the invention can be selective for a single acid, e.g., oleic, linoleic or alpha-linolenic acid individually, or, can be selective for two acids only, e.g., oleic or linoleic acids only, or, linoleic or alpha-linolenic only, etc. Alternatively, an enzyme of the invention can be enantioselective (in esterification or hydrolysis). For example, an enzyme can be selective for only a single position, or, selective for only two positions, e.g., only 1,2 esterification, or, only 1,3 esterification, or, only 2,3 esterification (or, in the reverse reaction, hydrolysis).

[0506] In one aspect, the invention provides processes for the selective removal of fatty acids (e.g., undesirable fatty acids) from oils, e.g., separating saturated and/or unsaturated fatty acids from oils, using a hydrolase (e.g., a lipase, an esterase) of the invention. The process of the invention can separate saturated and/or unsaturated fatty acids from any oil, e.g., a soy oil. The enzyme can be chemoselective and/or enantioselective. The process can comprise selective acylation with cis isomers, Sn-2 esterification, enzymatic hydrogenation. In one aspect, these processes generate high stability fats and oils, e.g., “healthy” frying oils. The process of the invention can be used to generate oils with less sulfur, e.g., using a process comprising sulfur removal from crude oil. The enzymes of the invention can also be used in interesterification processes for these and other purposes.

[0507] In one aspect, an enzyme of the invention is used to generate a “no-trans” fat oil. In one aspect, a “no-trans” oil is generated from a partially hydrogenated oil to produce a cis-only oil. The enzyme can be chemoselective and/or enantioselective.

[0508] In one aspect, the invention provides processes for modifying cocoa butters using an enzyme of the invention. About 80% of cocoa butters comprise POP, SOS and POS triglycerides (P is palmitic fatty acid, O is oleic fatty acid, S is stearic fatty acid). The saturated-unsaturated-saturated fatty acid structure of cocoa butters imparts their characteristic melting profiles, e.g., in chocolates. In one aspect, the structured and direct synthetic processes of the invention are used on cocoa butters to reduce cocoa butter variations or to produce synthetic cocoa butters (“cocoa butter alternatives”). In one aspect, a chemoselective and/or enantioselective (e.g., a regio-selective) hydrolase (e.g., lipase or esterase) of the invention is used to make a cocoa butter alternative, e.g., a cocoa butter substitute, a cocoa butter replacer and/or a cocoa butter equivalent. Thus, the invention also provides cocoa butter alternatives, including cocoa butter substitutes, cocoa butter replacers and cocoa butter equivalents and their manufacturing intermediates comprising an enzyme of the invention. A process of the invention (using an enzyme of the invention) for making cocoa butter alternatives can comprise blending a vegetable oil, e.g., a palm oil, with shea or equivalent, illipe or equivalent and Sal sterins or equivalent. In one aspect, the process of the invention comprises use of interesterification. The process of the invention can generate compositional or crystalline forms that mimic “natural” cocoa butter.

[0509] In one aspect, the invention provides processes (using an enzyme of the invention) for producing a diacylglycerol (DAG), e.g., 1, 3 diacylglycerol, using a vegetable oil, e.g., a low cost oil. The enzyme can be chemoselective and/or enantioselective. The process of the invention can result in a DAG-comprising composition having good stability, long shelf life and high temperature performance.

[0510] Enzymatic Processing of Oilseeds

[0511] The invention provides compositions (e.g., hydrolase enzymes of the invention, such as lipases, phospholipases, esterases, proteases) and methods for enzymatic processing of oilseeds, including soybean, canola, coconut, avocado and olive paste. In one aspect, these processes of the invention can increase the oil yield and to improve the nutritional quality of the obtained meals. In some aspects, enzymatic processing of oilseeds using compositions and methods of the invention will provide economical and environmental benefits, as well as alternative technologies for oil extraction and processing food for human and animal consumption. In alternative aspects, the processes of the invention comprise use of any hydrolase of the invention, e.g., a phospholipases of the invention (or another phospholipase), a protease of the invention (or another protease), phosphatases, phytases, xylanases, an amylase, e.g., α-amylases, a glucanase, e.g., β-glucanases, a polygalacturonase, galactolipases, a cellulase, a hemicellulase, a pectinases and/or other plant cell wall degrading enzymes, as well as mixed enzyme preparations and cell lysates, or enzyme preparations from recombinant sources, e.g., host cells or transgenic plants.

[0512] In alternative aspects, the processes of the invention can be practiced in conjunction with other processes, e.g., enzymatic treatments, e.g., with carbohydrases, including cellulase, hemicellulase and other side degrading activities, or, chemical processes, e.g., hexane extraction of soybean oil. The enzymatic treatment can increase the oil extractability by 8-10% when the enzymatic treatment is carried out prior to the solvent extraction.

[0513] In alternative aspects, the processes of the invention can be practiced with aqueous extraction processes. The aqueous extraction methods can be environmentally cleaner alternative technologies for oil extraction. Low extraction yields of aqueous process can be overcome by using enzymes that hydrolyze the structural polysaccharides forming the cell wall of oilseeds, or that hydrolyze the proteins which form the cell and lipid body membranes, e.g., utilizing digestions comprising cellulase, hemicellulase, and/or protopectinase for extraction of oil from soybean cells. In one aspect, methods are practiced with an enzyme of the invention as described by Kasai (2003) J. Agric. Food Chem. 51:6217-6222, who reported that the most effective enzyme to digest the cell wall was cellulase.

[0514] In one aspect, proteases of the invention or other proteases are used in combination with the methods of the invention. The combined effect of operational variables and enzyme activity of a protease and cellulase on oil and protein extraction yields combined with other process parameters, such as enzyme concentration, time of hydrolysis, particle size and solid-to-liquid ratio has been evaluated. In one aspect, methods are practiced with an enzyme of the invention as described by Rosenthal (2001) Enzyme and Microb. Tech. 28:499-509, who reported that use of protease can result in significantly higher yields of oil and protein over the control when heat treated flour is used.

[0515] In one aspect, complete protein, pectin, and hemicellulose extraction are used in combination with the methods of the invention. The plant cell consists of a series of polysaccharides often associated with or replaced by proteins or phenolic compounds. Most of these carbohydrates are only partially digested or poorly utilized by the digestive enzymes. The disruption of these structures through processing or degrading enzymes can improve their nutrient availability. In one aspect, methods are practiced with an enzyme of the invention as described by Ouhida (2002) J. Agric. Food Chem. 50:1933-1938, who reported that a significant degradation of the soybean cell wall cellulose (up to 20%) has been achieved after complete protein, pectin, and hemicellulose extraction.

[0516] In one aspect, the methods of the invention further comprise incorporation of various enzymatic treatments in the treatment of seeds, e.g., canola seeds, these treatments comprising use of proteases of the invention (or other proteases), cellulases, and hemicellulases (in various combinations with each other and with one or more enzymes of the invention). For example, the methods can comprise enzymatic treatments of canola seeds at 20 to 40 moisture during the incubation with enzymes prior to a conventional process; as described, e.g., by Sosulski (1990) Proc. Can. Inst. Food Sci. Technol. 3:656. The methods of the invention can further comprise incorporation of proteases of the invention (or other proteases), α-amylases, polygalacturonases (in various combinations with each other and with one or more enzymes of the invention) to hydrolyze cellular material in coconut meal and release the coconut oil, which can be recovered by centrifugation, as described, e.g., by McGlone (1986) J. of Food Sci. 51:695-697. The methods of the invention can further comprise incorporation of pectinases, α-amylases, proteases of the invention (or other proteases), cellulases in different combinations (with each other and with one or more enzymes of the invention) to result in significant yield improvement (˜70% in the best case) during enzymatic extraction of avocado oil, as described, e.g., by Buenrostro (1986) Biotech. Letters 8(7):505-506. In processes of the invention for olive oil extraction, olive paste is treated with cellulase, hemicellulase, poligalacturonase, pectin-methyltransferase, protease of the invention (or other proteases) and their combinations (with each other and with one or more enzymes of the invention), as described, e.g., by Montedoro (1976) Acta Vitamin. Enzymol. (Milano) 30:13.

[0517] Oil Degumming and Vegetable Oil Processing

[0518] The enzymes of the invention (e.g., lipases, phospholipases, esterases, proteases of the invention) can be used in various vegetable oil processing steps, such as in vegetable oil extraction, particularly, in the removal of “phospholipid gums” in a process called “oil degumming,”.

[0519] In one aspect, the invention provides oil degumming processes comprising use of a hydrolase of the invention having a phospholipase C (PLC) activity. In one aspect, the process further comprises addition of a PLA of the invention and/or a patatin-like phospholipase of the invention. In one aspect, all enzymes are added together, or, alternatively, the PLC addition is followed by PLA and/or patatin addition. In one aspect, this process provides a yield improvement as a result of the PLC treatment. In one aspect, this process provides an additional decrease of the phosphorus content of the oil as a result of the PLA treatment.

[0520] The invention provides methods for processing vegetable oils from various sources, such as rice bran, soybeans, rapeseed, peanuts and other nuts, sesame, sunflower, palm and corn. The methods can used in conjunction with processes based on extraction with as hexane, with subsequent refining of the crude extracts to edible oils, including use of the methods and enzymes of the invention. The first step in the refining sequence is the so-called “degumming” process, which serves to separate phosphatides by the addition of water. The material precipitated by degumming is separated and further processed to mixtures of lecithins. The commercial lecithins, such as soybean lecithin and sunflower lecithin, are semi-solid or very viscous materials. They consist of a mixture of polar lipids, mainly phospholipids, and oil, mainly triglycerides.

[0521] The enzymes (e.g., phospholipases) of the invention can be used in any “degumming” procedure, including water degumming, ALCON oil degumming (e.g., for soybeans), safinco degumming, “super degumming,” UF degumming, TOP degumming, uni-degumming, dry degumming and ENZYMAX™ degumming. See, e.g., U.S. Pat. Nos. 6,355,693; 6,162,623; 6,103,505; 6,001,640; 5,558,781; 5,264,367. Various “degumming” procedures incorporated by the methods of the invention are described in Bockisch, M. (1998) In Fats and Oils Handbook, The extraction of Vegetable Oils (Chapter 5), 345-445, AOCS Press, Champaign, Ill. The enzymes (e.g., phospholipases) of the invention can be used in the industrial application of enzymatic degumming of triglyceride oils as described, e.g., in EP 513 709.

[0522] In one aspect, hydrolases (e.g., phospholipases) of the invention are used to treat vegetable oils, e.g., crude oils, such as rice bran, soy, canola, flower and the like. In one aspect, this improves the efficiency of the degumming process. In one aspect, the invention provides methods for enzymatic degumming under conditions of low water, e.g., in the range of between about 0.1% to 20% water, or, 0.5% to 10% water. In one aspect, this results in the improved separation of a heavy phase from the oil phase during centrifugation. The improved separation of these phases can result in more efficient removal of phospholipids from the oil, including both hydratable and nonhydratable oils. In one aspect, this can produce a gum fraction that contains less entrained neutral oil, thereby improving the overall yield of oil during the degumming process.

[0523] The hydrolases (e.g., phospholipases) of the invention can be used in the industrial application of enzymatic degumming as described, e.g., in CA 1102795, which describes a method of isolating polar lipids from cereal lipids by the addition of at least 50% by weight of water. This method is a modified degumming in the sense that it utilizes the principle of adding water to a crude oil mixture.

[0524] In one aspect, the invention provides enzymatic processes comprising use of phospholipases of the invention (e.g., a PLC) comprising hydrolysis of hydrated phospholipids in oil at a temperature of about 20° C. to 40° C., at an alkaline pH, e.g., a pH of about pH 8 to pH 10, using a reaction time of about 3 to 10 minutes. This can result in less than 10 ppm final oil phosphorus levels. The invention also provides enzymatic processes comprising use of phospholipases of the invention (e.g., a PLC) comprising hydrolysis of hydratable and non-hydratable phospholipids in oil at a temperature of about 50° C. to 60° C., at a pH slightly below neutral, e.g., of about pH 5 to pH 6.5, using a reaction time of about 30 to 60 minutes. This can result in less than 10 ppm final oil phosphorus levels.

[0525] In one aspect, the invention provides enzymatic processes that utilize a phospholipase C enzyme to hydrolyze a glyceryl phosphoester bond and thereby enable the return of the diacylglyceride portion of phospholipids back to the oil, e.g., a vegetable, fish or algae oil (a “phospholipase C (PLC) caustic refining aid”); and, reduce the phospholipid content in a degumming step to levels low enough for high phosphorous oils to be physically refined (a “phospholipase C (PLC) degumming aid”). The two approaches can generate different values and have different target applications.

[0526] In various exemplary processes of the invention, a number of distinct steps compose the degumming process preceding the core bleaching and deodorization refining processes. These steps include heating, mixing, holding, separating and drying. Following the heating step, water and often acid are added and mixed to allow the insoluble phospholipid “gum” to agglomerate into particles which may be separated. While water separates many of the phosphatides in degumming, portions of the phospholipids are non-hydratable phosphatides (NHPs) present as calcium or magnesium salts. Degumming processes address these NHPs by the addition of acid. Following the hydration of phospholipids, the oil is mixed, held and separated by centrifugation. Finally, the oil is dried and stored, shipped or refined. The resulting gums are either processed further for lecithin products or added back into the meal.

[0527] In various exemplary processes of the invention phosphorous levels are reduced low enough for physical refining. The separation process can result in potentially higher yield losses than caustic refining. Additionally, degumming processes may generate waste products that may not be sold as commercial lecithin. Therefore, these processes have not achieved a significant share of the market and caustic refining processes continue to dominate the industry for rice bran, soy, canola and sunflower. Note however, that a phospholipase C enzyme employed in a special degumming process would decrease gum formation and return the diglyceride portion of the phospholipid back to the oil.

[0528] In one aspect, a phospholipase C enzyme of the invention hydrolyzes a phosphatide at a glyceryl phosphoester bond to generate a diglyceride and water-soluble phosphate compound. The hydrolyzed phosphatide moves to the aqueous phase, leaving the diglyceride in the oil phase. One objective of the PLC “Caustic Refining Aid” is to convert the phospholipid gums formed during neutralization into a diacylglyceride that will migrate back into the oil phase. In contrast, one objective of the “PLC Degumming Aid” is to reduce the phospholipids in crude oil to a phosphorous equivalent of less than 10 parts per million.

[0529] In one aspect, a phospholipase C enzyme of the invention will hydrolyze the phosphatide from both hydratable and non-hydratable phospholipids in neutralized crude and degummed oils before bleaching and deodorizing. The target enzyme can be applied as a drop-in product in the existing caustic neutralization process. In this aspect, the enzyme will not be required to withstand extreme pH levels if it is added after the addition of caustic.

[0530] In one aspect, a phospholipase of the invention enables phosphorous to be removed to the low levels acceptable in physical refining. In one aspect, a PLC of the invention will hydrolyze the phosphatide from both hydratable and non-hydratable phospholipids in crude oils before bleaching and deodorizing. The target enzyme can be applied as a drop-in product in the existing degumming operation. Given sub-optimal mixing in commercial equipment, it is likely that acid will be required to bring the non-hydratable phospholipids in contact with the enzyme at the oil/water interface. Therefore, in one aspect, an acid-stable PLC of the invention is used.

[0531] In one aspect, a PLC Degumming Aid process of the invention can eliminate losses in one, or all three, areas: 1) Oil lost in gum formation & separation; 2) Saponified oil in caustic addition; 3) Oil trapped in clay in bleaching. Losses associated in a PLC process can be estimated to be about 0.8% versus 5.2% on a mass basis due to removal of the phosphatide. Additional potential benefits of this process of the invention include the following:
[0532] Reduced adsorbents—less adsorbents required with lower (<5 ppm) phosphorous
[0533] Lower chemical usage—less chemical and processing costs associated with hydration of non-hydratable phospholipids
[0534] Lower waste generation—less water required to remove phosphorous from oil

[0535] Oils processed (e.g., “degummed”) by the methods of the invention include plant oilseeds, e.g., rice bran, soybean oil, rapeseed oil and sunflower oil. In one aspect, the “PLC Caustic Refining Aid” of the invention can save 1.2% over existing caustic refining processes. The refining aid application addresses soy oil that has been degummed for lecithin and these are also excluded from the value/load calculations.

[0536] Other processes that can be used with a phospholipase of the invention, e.g., a phospholipase A₁ of the invention can convert non-hydratable native phospholipids to a hydratable form. In one aspect, the enzyme is sensitive to heat. This may be desirable, since heating the oil can destroy the enzyme. However, the degumming reaction must be adjusted to pH 4-5 and 60° C. to accommodate this enzyme. At 300 Units/kg oil saturation dosage, this exemplary process is successful at taking previously water-degummed oil phosphorous content down to ≦10 ppm P. Advantages can be decreased H₂0 content and resultant savings in usage, handling and waste.

[0537] In addition to these various “degumming” processes, the enzymes of the invention can be used in any vegetable oil processing step. For example, phospholipase enzymes of the invention can be used in place of PLA, e.g., phospholipase A2, in any vegetable oil processing step. Oils that are “processed” or “degummed” in the methods of the invention include soybean oils, rapeseed oils, corn oils, oil from rice bran oils, palm kernels, canola oils, sunflower oils, sesame oils, peanut oils, and the like. The main products from this process include triglycerides.

[0538] In one exemplary process, when the enzyme is added to and reacted with a crude oil, the amount of phospholipase employed is about 10-10,000 units, or, alternatively, about, 100-2,000 units, per 1 kg of crude oil. The enzyme treatment is conducted for 5 min to 10 hours at a temperature of 30° C. to 90° C., or, alternatively, about, 40° C. to 70° C. The conditions may vary depending on the optimum temperature of the enzyme. The amount of water added to dissolve the enzyme is 5-1,000 wt. parts per 100 wt. parts of crude oil, or, alternatively, about, 10 to 200 wt. parts per 100 wt. parts of crude oil.

[0539] Upon completion of such enzyme treatment, the enzyme liquid is separated with an appropriate means such as a centrifugal separator and the processed oil is obtained. Phosphorus-containing compounds produced by enzyme decomposition of gummy substances in such a process are practically all transferred into the aqueous phase and removed from the oil phase. Upon completion of the enzyme treatment, if necessary, the processed oil can be additionally washed with water or organic or inorganic acid such as, e.g., acetic acid, phosphoric acid, succinic acid, and the like, or with salt solutions.

[0540] In one exemplary process for ultra-filtration degumming, the enzyme is bound to a filter or the enzyme is added to an oil prior to filtration or the enzyme is used to periodically clean filters.

[0541] In one aspect, the invention provides processes using a hydrolase of the invention, e.g., a phospholipase of the invention, such as a phospholipase-specific phosphohydrolase of the invention, or another phospholipase, in a modified “organic refining process,” which can comprise addition of the enzyme (e.g., a hydrolase, such as a PLC) in a citric acid holding tank.

[0542] Enzymes of the invention are used to improve oil extraction and oil degumming (e.g., vegetable oils). In one aspect, a hydrolase (e.g., phospholipase, such as a PLC) of the invention and at least one plant cell wall degrader (e.g., a cellulase, a hemicellulase or the like, to soften walls and increase yield at extraction) is used in a process of the invention. In this exemplary approach to using enzymes of the invention to improve oil extraction and oil degumming, a hydrolase (e.g., phospholipase C) of the invention as well as other hydrolases (e.g., a cellulase, a hemicellulase, an esterase of the invention or another esterase, a protease of the invention of the invention or another protease and/or a phosphatase) are used during the crushing steps associated with oil production (including but not limited to soybean, canola, rice bran and sunflower oil). By using enzymes prior to or in place of solvent extraction, it is possible to increase oil yield and reduce the amount of hydratable and non-hydratable phospholipids in the crude oil. The reduction in non-hydratable phospholipids may result from conversion of potentially non-hydratable phospholipids to diacylglycerol and corresponding phosphate-ester prior to complexation with calcium or magnesium. The overall reduction of phospholipids in the crude oil will result in improved yields during refining with the potential for eliminating the requirement for a separate degumming step prior to bleaching and deodorization.

[0543] In one exemplary process for a phospholipase-mediated physical refining aid, water and enzyme are added to crude oil. In one aspect, a PLC or a PLD and a phosphatase are used in the process. In phospholipase-mediated physical refining, the water level can be low, i.e. 0.5-5% and the process time should be short (less than 2 hours, or, less than 60 minutes, or, less than 30 minutes, or, less than 15 minutes, or, less than 5 minutes). The process can be run at different temperatures (25° C. to 70° C.), using different acids and/or caustics, at different pHs (e.g., 3-10).

[0544] In alternate aspects, water degumming is performed first to collect lecithin by centrifugation and then PLC or PLC and PLA is added to remove non-hydratable phospholipids (the process should be performed under low water concentration). In another aspect, water degumming of crude oil to less than 10 ppm (edible oils) and subsequent physical refining (less than 50 ppm for biodiesel) is performed. In one aspect, an emulsifier is added and/or the crude oil is subjected to an intense mixer to promote mixing. Alternatively, an emulsion-breaker is added and/or the crude oil is heated to promote separation of the aqueous phase. In another aspect, an acid is added to promote hydration of non-hydratable phospholipids. Additionally, phospholipases can be used to mediate purification of phytosterols from the gum/soapstock.

[0545] The enzymes of the invention can be used in any oil processing method, e.g., degumming or equivalent processes. For example, the enzymes of the invention can be used in processes as described in U.S. Pat. Nos. 5,558,781; 5,264,367; 6,001,640. The process described in U.S. Pat. No. 5,558,781 uses either phospholipase A1, A2 or B, essentially breaking down lecithin in the oil that behaves as an emulsifier.

[0546] The enzymes and methods of the invention can be used in processes for the reduction of phosphorus-containing components in edible oils comprising a high amount of non-hydratable phosphorus by using of a phospholipase of the invention, e.g., a polypeptide having a phospholipase A and/or B activity, as described, e.g., in EP Patent Number: EP 0869167. In one aspect, the edible oil is a crude oil, a so-called “non-degummed oil.” In one aspect, the method treat a non-degummed oil, including pressed oils or extracted oils, or a mixture thereof, from, e.g., rice bran, rapeseed, soybean, sesame, peanut, corn or sunflower. The phosphatide content in a crude oil can vary from 0.5 to 3% w/w corresponding to a phosphorus content in the range of 200 to 1200 ppm, or, in the range of 250 to 1200 ppm. Apart from the phosphatides, the crude oil can also contains small concentrations of carbohydrates, sugar compounds and metal/phosphatide acid complexes of Ca, Mg and Fe. In one aspect, the process comprises treatment of a phospholipid or lysophospholipid with the phospholipase of the invention so as to hydrolyze fatty acyl groups. In one aspect, the phospholipid or lysophospholipid comprises lecithin or lysolecithin. In one aspect of the process the edible oil has a phosphorus content from between about 50 to 250 ppm, and the process comprises treating the oil with a phospholipase of the invention so as to hydrolyze a major part of the phospholipid and separating an aqueous phase containing the hydrolyzed phospholipid from the oil. In one aspect, prior to the enzymatic degumming process the oil is water-degummed. In one aspect, the methods provide for the production of an animal feed comprising mixing the phospholipase of the invention with feed substances and at least one phospholipid.

[0547] The enzymes and methods of the invention can be used in processes of oil degumming as described, e.g., in WO 98/18912. The phospholipases of the invention can be used to reduce the content of phospholipid in an edible oil. The process can comprise treating the oil with a phospholipase of the invention to hydrolyze a major part of the phospholipid and separating an aqueous phase containing the hydrolyzed phospholipid from the oil. This process is applicable to the purification of any edible oil, which contains a phospholipid, e.g. vegetable oils, such as rice bran, soybean oil, rapeseed oil and sunflower oil, fish oils, algae and animal oils and the like. Prior to the enzymatic treatment, the vegetable oil is preferably pretreated to remove slime (mucilage), e.g. by wet refining. The oil can contain 50-250 ppm of phosphorus as phospholipid at the start of the treatment with phospholipase, and the process of the invention can reduce this value to below 5-10 ppm.

[0548] The enzymes of the invention can be used in processes as described in JP Application No. H5-132283, filed Apr. 25, 1993, which comprises a process for the purification of oils and fats comprising a step of converting phospholipids present in the oils and fats into water-soluble substances containing phosphoric acid groups and removing them as water-soluble substances. An enzyme action is used for the conversion into water-soluble substances. An enzyme having a phospholipase C activity is preferably used as the enzyme.

[0549] The enzymes of the invention can be used in processes as described as the “Organic Refining Process,” (ORP) (IPH, Omaha, Nebr.) which is a method of refining seed oils. ORP may have advantages over traditional chemical refining, including improved refined oil yield, value added co-products, reduced capital costs and lower environmental costs.

[0550] The enzymes of the invention can be used in processes for the treatment of an oil or fat, animal or vegetal, raw, semi-processed or refined, comprising adding to such oil or fat at least one enzyme of the invention that allows hydrolyzing and/or depolymerizing the non-glyceridic compounds contained in the oil, as described, e.g., in EP Application number: 82870032.8. Exemplary methods of the invention for hydrolysis and/or depolymerization of non-glyceridic compounds in oils are:
[0551] 1) The addition and mixture in oils and fats of an enzyme of the invention or enzyme complexes previously dissolved in a small quantity of appropriate solvent (for example water). A certain number of solvents are possible, but a non-toxic and suitable solvent for the enzyme is chosen. This addition may be done in processes with successive loads, as well as in continuous processes. The quantity of enzyme(s) necessary to be added to oils and fats, according to this process, may range, depending on the enzymes and the products to be processed, from 20 to 400 ppm, i.e., from 0.02 kg to 0.4 kg of enzyme for 1000 kg of oil or fat, and preferably from 20 to 100 ppm, i.e., from 0.02 to 0.1 kg of enzyme for 1000 kg of oil, these values being understood to be for concentrated enzymes, i.e., without diluent or solvent.
[0552] 2) Passage of the oil or fat through a fixed or insoluble filtering bed of enzyme(s) of the invention on solid or semi-solid supports, preferably presenting a porous or fibrous structure. In this technique, the enzymes are trapped in the micro-cavities of the porous or fibrous structure of the supports. These consist, for example, of resins or synthetic polymers, cellulose carbonates, gels such as agarose, filaments of polymers or copolymers with porous structure, trapping small droplets of enzyme in solution in their cavities. Concerning the enzyme concentration, it is possible to go up to the saturation of the supports.
[0553] 3) Dispersion of the oils and fats in the form of fine droplets, in a diluted enzymatic solution, preferably containing 0.2 to 4% in volume of an enzyme of the invention. This technique is described, e.g., in Belgian patent No. 595,219. A cylindrical column with a height of several meters, with conical lid, is filled with a diluted enzymatic solution. For this purpose, a solvent that is non-toxic and non-miscible in the oil or fat to be processed, preferably water, is chosen. The bottom of the column is equipped with a distribution system in which the oil or fat is continuously injected in an extremely divided form (approximately 10,000 flux per m²). Thus an infinite number of droplets of oil or fat are formed, which slowly rise in the solution of enzymes and meet at the surface, to be evacuated continuously at the top of the conical lid of the reactor.

[0554] Palm oil can be pre-treated before treatment with an enzyme of the invention. For example, about 30 kg of raw palm oil is heated to +50° C. 1% solutions were prepared in distilled water with cellulases and pectinases. 600 g of each of these was added to aqueous solutions of the oil under strong agitation for a few minutes. The oil is then kept at +50° C. under moderate agitation, for a total reaction time of two hours. Then, temperature is raised to +90° C. to deactivate the enzymes and prepare the mixture for filtration and further processing. The oil is dried under vacuum and filtered with a filtering aid.

[0555] The enzymes of the invention can be used in processes as described in EP patent EP 0 513 709 B2. For example, the invention provides a process for the reduction of the content process for the reduction of the content of phosphorus-containing components in animal and vegetable oils by enzymatic decomposition using a phospholipase of the invention. A predemucilaginated animal and vegetable oil with a phosphorus content of 50 to 250 ppm is agitated with an organic carboxylic acid and the pH value of the resulting mixture set to pH 4 to pH 6, an enzyme solution which contains phospholipase A₁, A₂, or B of the invention is added to the mixture in a mixing vessel under turbulent stirring and with the formation of fine droplets, where an emulsion with 0.5 to 5% by weight relative to the oil is formed, said emulsion being conducted through at least one subsequent reaction vessel under turbulent motion during a reaction time of 0.1 to 10 hours at temperatures in the range of 20 to 80° C. and where the treated oil, after separation of the aqueous solution, has a phosphorus content under 5 ppm.

[0556] The organic refining process is applicable to both crude and degummed oil. The process uses inline addition of an organic acid under controlled process conditions, in conjunction with conventional centrifugal separation. The water separated naturally from the vegetable oil phospholipids (“VOP”) is recycled and reused. The total water usage can be substantially reduced as a result of the Organic Refining Process.

[0557] The phospholipases and methods of the invention can also be used in the enzymatic treatment of edible oils, as described, e.g., in U.S. Pat. No. 6,162,623. In this exemplary methods, the invention provides an amphiphilic enzyme. It can be immobilized, e.g., by preparing an emulsion containing a continuous hydrophobic phase and a dispersed aqueous phase containing the enzyme and a carrier for the enzyme and removing water from the dispersed phase until this phase turns into solid enzyme coated particles. The enzyme can be a lipase. The immobilized lipase can be used for reactions catalyzed by lipase such as interesterification of mono-, di- or triglycerides, de-acidification of a triglyceride oil, or removal of phospholipids from a triglyceride oil when the lipase is a phospholipase. The aqueous phase may contain a fermentation liquid, an edible triglyceride oil may be the hydrophobic phase, and carriers include sugars, starch, dextran, water soluble cellulose derivatives and fermentation residues. This exemplary method can be used to process triglycerides, diglycerides, monoglycerides, glycerol, phospholipids or fatty acids, which may be in the hydrophobic phase. In one aspect, the process for the removal of phospholipids from triglyceride oil comprising mixing a triglyceride oil containing phospholipids with a preparation containing a phospholipase of the invention; hydrolyzing the phospholipids to lysophospholipid; separating the hydrolyzed phospholipids from the oil, wherein the phospholipase is an immobilized phospholipase.

[0558] The enzymes (e.g., lipases, phospholipases, esterases, proteases) of the invention and methods of the invention can also be used in the enzymatic treatment of edible oils, as described, e.g., in U.S. Pat. No. 6,127,137. One exemplary method hydrolyzes both fatty acyl groups in intact phospholipid. A phospholipase of the invention used in this method can have no lipase activity and can be active at very low pH. These properties make it very suitable for use in oil degumming, as enzymatic and alkaline hydrolysis (saponification) of the oil can both be suppressed.

[0559] In one aspect, the invention provides a process for hydrolyzing fatty acyl groups in a phospholipid or lysophospholipid comprising treating the phospholipid or lysophospholipid with the phospholipase that hydrolyzes both fatty acyl groups in a phospholipid and is essentially free of lipase activity. In one aspect, the phospholipase of the invention has a temperature optimum at about 50° C., measured at pH 3 to pH 4 for 10 minutes, and a pH optimum of about pH 3, measured at 40° C. for about 10 minutes. In one aspect, the phospholipid or lysophospholipid comprises lecithin or lysolecithin. In one aspect, after hydrolyzing a major part of the phospholipid, an aqueous phase containing the hydrolyzed phospholipid is separated from the oil. In one aspect, the invention provides a process for removing phospholipid from an edible oil, comprising treating the oil at pH 1.5 to 3 with a dispersion of an aqueous solution of the phospholipase of the invention, and separating an aqueous phase containing the hydrolyzed phospholipid from the oil. In one aspect, the oil is treated to remove mucilage prior to the treatment with the phospholipase. In one aspect, the oil prior to the treatment with the phospholipase contains the phospholipid in an amount corresponding to 50 to 250 ppm of phosphorus. In one aspect, the treatment with phospholipase is done at 30° C. to 45° C. for 1 to 12 hours at a phospholipase dosage of 0.1 to 10 mg/l in the presence of 0.5 to 5% of water.

[0560] The enzymes (e.g., lipases, phospholipases, esterases, proteases) of the invention and methods of the invention can also be used in the enzymatic treatment of edible oils, as described, e.g., in U.S. Pat. No. 6,025,171. In this exemplary method, enzymes of the invention are immobilized by preparing an emulsion containing a continuous hydrophobic phase, such as a triglyceride oil, and a dispersed aqueous phase containing an amphiphilic enzyme, such as lipase or a phospholipase of the invention, and carrier material that is partly dissolved and partly undissolved in the aqueous phase, and removing water from the aqueous phase until the phase turns into solid enzyme coated carrier particles. The undissolved part of the carrier material may be a material that is insoluble in water and oil, or a water soluble material in undissolved form because the aqueous phase is already saturated with the water soluble material. The aqueous phase may be formed with a crude lipase fermentation liquid containing fermentation residues and biomass that can serve as carrier materials. Immobilized lipase is useful for ester re-arrangement and de-acidification in oils. After a reaction, the immobilized enzyme can be regenerated for a subsequent reaction by adding water to obtain partial dissolution of the carrier, and with the resultant enzyme and carrier-containing aqueous phase dispersed in a hydrophobic phase evaporating water to again form enzyme coated carrier particles.

[0561] The enzymes (e.g., lipases, phospholipases, esterases, proteases) of the invention and methods of the invention can also be used in the enzymatic treatment of edible oils, as described, e.g., in U.S. Pat. No. 6,143,545. This exemplary method is used for reducing the content of phosphorous containing components in an edible oil comprising a high amount of non-hydratable phosphorus content using a phospholipase of the invention. In one aspect, the method is used to reduce the content of phosphorus containing components in an edible oil having a non-hydratable phosphorus content of at least 50 ppm measured by pre-treating the edible oil, at 60° C., by addition of a solution comprising citric acid monohydrate in water (added water vs. oil equals 4.8% w/w; (citric acid) in water phase=106 mM, in water/oil emulsion=4.6 mM) for 30 minutes; transferring 10 ml of the pre-treated water in oil emulsion to a tube; heating the emulsion in a boiling water bath for 30 minutes; centrifuging at 5000 rpm for 10 minutes, transferring about 8 ml of the upper (oil) phase to a new tube and leaving it to settle for 24 hours; and drawing 2 g from the upper clear phase for measurement of the non-hydratable phosphorus content (ppm) in the edible oil. The method also can comprise contacting an oil at a pH from about pH 5 to 8 with an aqueous solution of a phospholipase A or B of the invention (e.g., PLA1, PLA2, or a PLB), which solution is emulsified in the oil until the phosphorus content of the oil is reduced to less than 11 ppm, and then separating the aqueous phase from the treated oil.

[0562] The enzymes (e.g., lipases, phospholipases, esterases, proteases) of the invention and methods of the invention can also be used in the enzymatic treatment of edible oils, as described, e.g., in U.S. Pat. No. 5,532,163. The invention provides processes for the refining of oil and fat by which phospholipids in the oil and fat to be treated can be decomposed and removed efficiently. In one aspect, the invention provides a process for the refining of oil and fat which comprises reacting, in an emulsion, the oil and fat with an enzyme of the invention, e.g., an enzyme having an activity to decompose glycerol-fatty acid ester bonds in glycerophospholipids (e.g., a PLA2 of the invention); and another process in which the enzyme-treated oil and fat is washed with water or an acidic aqueous solution. In one aspect, the acidic aqueous solution to be used in the washing step is a solution of at least one acid, e.g., citric acid, acetic acid, phosphoric acid and salts thereof. In one aspect, the emulsified condition is formed using 30 weight parts or more of water per 100 weight parts of the oil and fat. Since oil and fat can be purified without employing the conventional alkali refining step, generation of washing waste water and industrial waste can be reduced. In addition, the recovery yield of oil is improved because loss of neutral oil and fat due to their inclusion in these wastes does not occur in the inventive process. In one aspect, the invention provides a process for refining oil and fat containing about 100 to 10,000 ppm of phospholipids which comprises: reacting, in an emulsified condition, said oil and fat with an enzyme of the invention having activity to decompose glycerol-fatty acid ester bonds in glycerophospholipids. In one aspect, the invention provides processes for refining oil and fat containing about 100 to 10,000 ppm of phospholipids which comprises reacting, in an emulsified condition, oil and fat with an enzyme of the invention having activity to decompose glycerol-fatty acid ester bonds in glycerophospholipids; and subsequently washing the treated oil and fat with a washing water.

[0563] The enzymes (e.g., lipases, phospholipases, esterases, proteases) of the invention and methods of the invention can also be used in the enzymatic treatment of edible oils, as described, e.g., in U.S. Pat. No. 5,264,367. The content of phosphorus-containing components and the iron content of an edible vegetable or animal oil, such as an oil, e.g., soybean oil, which has been wet-refined to remove mucilage, are reduced by enzymatic decomposition by contacting the oil with an aqueous solution of an enzyme of the invention, e.g., a phospholipase A1, A2, or B, and then separating the aqueous phase from the treated oil. In one aspect, the invention provides an enzymatic method for decreasing the content of phosphorus- and iron-containing components in oils, which have been refined to remove mucilage. An oil, which has been refined to remove mucilage, can be treated with an enzyme of the invention, e.g., phospholipase C, A1, A2, or B. Phosphorus contents below 5 ppm and iron contents below 1 ppm can be achieved. The low iron content can be advantageous for the stability of the oil.

[0564] The enzymes (e.g., lipases, phospholipases, esterases, proteases) of the invention and methods of the invention can also be used for preparing transesterified oils, as described, e.g., in U.S. Pat. No. 5,288,619. The invention provides methods for enzymatic transesterification for preparing a margarine oil having both low trans-acid and low intermediate chain fatty acid content. The method includes the steps of providing a transesterification reaction mixture containing a stearic acid source material and an edible liquid vegetable oil, transesterifying the stearic acid source material and the vegetable oil using a 1-, 3-positionally specific lipase, and then finally hydrogenating the fatty acid mixture to provide a recycle stearic acid source material for a recyclic reaction with the vegetable oil. The invention also provides a counter-current method for preparing a transesterified oil. The method includes the steps of providing a transesterification reaction zone containing a 1-, 3-positionally specific lipase, introducing a vegetable oil into the transesterification zone, introducing a stearic acid source material, conducting a supercritical gas or subcritical liquefied gas counter-current fluid, carrying out a transesterification reaction of the triglyceride stream with the stearic acid or stearic acid monoester stream in the reaction zone, withdrawing a transesterified triglyceride margarine oil stream, withdrawing a counter-current fluid phase, hydrogenating the transesterified stearic acid or stearic acid monoester to provide a hydrogenated recycle stearic acid source material, and introducing the hydrogenated recycle stearic acid source material into the reaction zone.

[0565] In one aspect, the highly unsaturated phospholipid compound may be converted into a triglyceride by appropriate use of a phospholipase C of the invention to remove the phosphate group in the sn-3 position, followed by 1,3 lipase acyl ester synthesis. The 2-substituted phospholipid may be used as a functional food ingredient directly, or may be subsequently selectively hydrolyzed in reactor 160 using an immobilized phospholipase C of the invention to produce a 1-diglyceride, followed by enzymatic esterification as described herein to produce a triglyceride product having a 2-substituted polyunsaturated fatty acid component.

[0566] The enzymes (e.g., lipases, phospholipases, esterases, proteases) of the invention and methods of the invention can also be used in a vegetable oil enzymatic degumming process as described, e.g., in U.S. Pat. No. 6,001,640. This method of the invention comprises a degumming step in the production of edible oils. Vegetable oils from which hydratable phosphatides have been eliminated by a previous aqueous degumming process are freed from non-hydratable phosphatides by enzymatic treatment using a phospholipase of the invention. The process can be gentle, economical and environment-friendly. Phospholipases that only hydrolyze lysolecithin, but not lecithin, are used in this degumming process.

[0567] In one aspect, to allow the enzyme of the invention to act, both phases, the oil phase and the aqueous phase that contain the enzyme, must be intimately mixed. It may not be sufficient to merely stir them. Good dispersion of the enzyme in the oil is aided if it is dissolved in a small amount of water, e.g., 0.5-5 weight-% (relative to the oil), and emulsified in the oil in this form, to form droplets of less than 10 micrometers in diameter (weight average). The droplets can be smaller than 1 micrometer. Turbulent stirring can be done with radial velocities above 100 cm/sec. The oil also can be circulated in the reactor using an external rotary pump. The aqueous phase containing the enzyme can also be finely dispersed by means of ultrasound action. A dispersion apparatus can be used.

[0568] The enzymatic reaction probably takes place at the border surface between the oil phase and the aqueous phase. It is the goal of all these measures for mixing to create the greatest possible surface for the aqueous phase which contains the enzyme. The addition of surfactants increases the microdispersion of the aqueous phase. In some cases, therefore, surfactants with HLB values above 9, such as Na-dodecyl sulfate, are added to the enzyme solution, as described, e.g., in EP-A 0 513 709. A similar effective method for improving emulsification is the addition of lysolecithin. The amounts added can lie in the range of 0.001% to 1%, with reference to the oil. The temperature during enzyme treatment is not critical. Temperatures between 20° C. and 80° C. can be used, but the latter can only be applied for a short time. In this aspect, a phospholipase of the invention having a good temperature and/or low pH tolerance is used. Application temperatures of between 30° C. and 50° C. are optimal. The treatment period depends on the temperature and can be kept shorter with an increasing temperature. Times of 0.1 to 10 hours, or, 1 to 5 hours are generally sufficient. The reaction takes place in a degumming reactor, which can be divided into stages, as described, e.g., in DE-A 43 39 556. Therefore continuous operation is possible, along with batch operation. The reaction can be carried out in different temperature stages. For example, incubation can take place for 3 hours at 40° C., then for 1 hour at 60° C. If the reaction proceeds in stages, this also opens up the possibility of adjusting different pH values in the individual stages. For example, in the first stage the pH of the solution can be adjusted to 7, for example, and in a second stage to 2.5, by adding citric acid. In at least one stage, however, the pH of the enzyme solution must be below 4, or, below 3. If the pH was subsequently adjusted below this level, a deterioration of effect may be found. Therefore the citric acid can be added to the enzyme solution before the latter is mixed into the oil.

[0569] After completion of the enzyme treatment, the enzyme solution, together with the decomposition products of the NHP contained in it, can be separated from the oil phase, in batches or continuously, e.g., by means of centrifugation. Since the enzymes are characterized by a high level of stability and the amount of the decomposition products contained in the solution is slight (they may precipitate as sludge) the same aqueous enzyme phase can be used several times. There is also the possibility of freeing the enzyme of the sludge, see, e.g., DE-A 43 39 556, so that an enzyme solution which is essentially free of sludge can be used again. In one aspect of this degumming process, oils which contain less than 15 ppm phosphorus are obtained. One goal is phosphorus contents of less than 10 ppm; or, less than 5 ppm. With phosphorus contents below 10 ppm, further processing of the oil according to the process of distillative de-acidification is easily possible. A number of other ions, such as magnesium, calcium, zinc, as well as iron, can be removed from the oil, e.g., below 0.1 ppm. Thus, this product possesses ideal prerequisites for good oxidation resistance during further processing and storage.

[0570] The enzymes (e.g., lipases, phospholipases, esterases, proteases) of the invention and methods of the invention also can also be used for reducing the amount of phosphorous-containing components in vegetable and animal oils as described, e.g., in EP patent EP 0513709. In this method, the content of phosphorus-containing components, especially phosphatides, such as lecithin, and the iron content in vegetable and animal oils, which have previously been deslimed, e.g. soya oil, are reduced by enzymatic breakdown using a phospholipase A1, A2 or B of the invention.

[0571] The enzymes (e.g., lipases, phospholipases, esterases, proteases) of the invention and methods of the invention can also be used for refining fat or oils as described, e.g., in JP 06306386. The invention provides processes for refining a fat or oil comprising a step of converting a phospholipid in a fat or an oil into a water-soluble phosphoric-group-containing substance and removing this substance. The action of an enzyme of the invention (e.g., a PLC) is utilized to convert the phospholipid into the substance. Thus, it is possible to refine a fat or oil without carrying out an alkali refining step from which industrial wastes containing alkaline waste water and a large amount of oil are produced. Improvement of yields can be accomplished because the loss of neutral fat or oil from escape with the wastes can be reduced to zero. In one aspect, gummy substances are converted into water-soluble substances and removed as water-soluble substances by adding an enzyme of the invention having a phospholipase C activity in the stage of degumming the crude oil and conducting enzymatic treatment. In one aspect, the phospholipase C of the invention has an activity that cuts ester bonds of glycerin and phosphoric acid in phospholipids. If necessary, the method can comprise washing the enzyme-treated oil with water or an acidic aqueous solution. In one aspect, the enzyme of the invention is added to and reacted with the crude oil. The amount of phospholipase C employed can be 10 to 10,000 units, or, about 100 to 2,000 units, per 1 kg of crude oil.

[0572] The enzymes (e.g., lipases, phospholipases, esterases, proteases) of the invention and methods of the invention can also be used for water-degumming processes as described, e.g., in Dijkstra, Albert J., et al., Oleagineux, Corps Gras, Lipides (1998), 5(5), 367-370. In this exemplary method, the water-degumming process is used for the production of lecithin and for dry degumming processes using a degumming acid and bleaching earth. This method may be economically feasible only for oils with a low phosphatide content, e.g., palm oil, lauric oils, etc. For seed oils having a high NHP-content, the acid refining process is used, whereby this process is carried out at the oil mill to allow gum disposal via the meal. In one aspect, this acid refined oil is a possible “polishing” operation to be carried out prior to physical refining.

[0573] The enzymes (e.g., lipases, phospholipases, esterases, proteases) of the invention and methods of the invention can also be used for degumming processes as described, e.g., in Dijkstra, et al., Res. Dev. Dep., N.V. Vandemoortele Coord. Cent., Izegem, Belg. JAOCS, J. Am. Oil Chem. Soc. (1989), 66:1002-1009. In this exemplary method, the total degumming process involves dispersing an acid such as H₃PO₄ or citric acid into soybean oil, allowing a contact time, and then mixing a base such as caustic soda or Na silicate into the acid-in-oil emulsion. This keeps the degree of neutralization low enough to avoid forming soaps, because that would lead to increased oil loss. Subsequently, the oil passed to a centrifugal separator where most of the gums are removed from the oil stream to yield a gum phase with minimal oil content. The oil stream is then passed to a second centrifugal separator to remove all remaining gums to yield a dilute gum phase, which is recycled. Washing and drying or in-line alkali refining complete the process. After the adoption of the total degumming process, in comparison with the classical alkali refining process, an overall yield improvement of about 0.5% is realized. The totally degummed oil can be subsequently alkali refined, bleached and deodorized, or bleached and physically refined.

[0574] The enzymes (e.g., lipases, phospholipases, esterases, proteases) of the invention and methods of the invention can also be used for the removal of nonhydratable phospholipids from a plant oil, e.g., soybean oil, as described, e.g., in Hvolby, et al., Sojakagefabr., Copenhagen, Den., J. Amer. Oil Chem. Soc. (1971) 48:503-509. In this exemplary method, water-degummed oil is mixed at different fixed pH values with buffer solutions with and without Ca⁺⁺, Mg/Ca-binding reagents, and surfactants. The nonhydratable phospholipids can be removed in a nonconverted state as a component of micelles or of mixed emulsifiers. Furthermore, the nonhydratable phospholipids are removable by conversion into dissociated forms, e.g., by removal of Mg and Ca from the phosphatidates, which can be accomplished by acidulation or by treatment with Mg/Ca-complexing or Mg/Ca-precipitating reagents. Removal or chemical conversion of the nonhydratable phospholipids can result in reduced emulsion formation and in improved separation of the deacidified oil from the emulsion layer and the soapstock.

[0575] The enzymes (e.g., lipases, phospholipases, esterases, proteases) of the invention and methods of the invention can also be used for the degumming of vegetable oils as described, e.g., Buchold, et al., Frankfurt/Main, Germany. Fett Wissenschaft Technologie (1993), 95(8), 300-304. In this exemplary process of the invention for the degumming of edible vegetable oils, aqueous suspensions of an enzyme of the invention, e.g., phospholipase A2, is used to hydrolyze the fatty acid bound at the sn2 position of the phospholipid, resulting in 1-acyl-lysophospholipids which are insoluble in oil and thus more amenable to physical separation. Even the addition of small amounts corresponding to about 700 lecitase units/kg oil results in a residual P concentration of less than 10 ppm, so that chemical refining is replaceable by physical refining, eliminating the necessity for neutralization, soapstock splitting, and wastewater treatment.

[0576] The enzymes (e.g., lipases, phospholipases, esterases, proteases) of the invention and methods of the invention can also be used for the degumming of vegetable oils as described, e.g., by EnzyMax, Dahlke, Klaus. Dept. G-PDO, Lurgi Ol-Gas, Chemie, GmbH, Frankfurt, Germany; Oleagineux, Corps Gras, Lipides (1997), 4(1), 55-57. This exemplary process is a degumming process for the physical refining of almost any kind of oil. By an enzymatic-catalyzed hydrolysis, phosphatides are converted to water-soluble lysophosphatides which are separated from the oil by centrifugation. The residual phosphorus content in the enzymatically degummed oil can be as low as 2 ppm P.

[0577] The enzymes (e.g., lipases, phospholipases, esterases, proteases) of the invention and methods of the invention can also be used for the degumming of vegetable oils as described, e.g., by Cleenewerck, et al., N. V. Vamo Mills, Izegem, Belg. Fett Wissenschaft Technologie (1992), 94:317-22; and, Clausen, Kim; Nielsen, M., Novozymes A/S, Den. Dansk Kemi (2002) 83(2):24-27. The phospholipases and methods of the invention can incorporate the pre-refining of vegetable oils with acids as described, e.g., by Nilsson-Johansson, et al., Fats Oils Div., Alfa-Laval Food Eng. AB, Tumba, Swed. Fett Wissenschaft Technologie (1988), 90(11), 447-51; and, Munch, Ernst W. Cereol Deutschland GmbH, Mannheim, Germany. Editor(s): Wilson, Richard F., Proceedings of the World Conference on Oilseed Processing Utilization, Cancun, Mexico, Nov. 12-17, 2000 (2001), Meeting Date 2000, 17-20.

[0578] The enzymes (e.g., lipases, phospholipases, esterases, proteases) of the invention and methods of the invention can also be used for the degumming of vegetable oils as described, e.g., by Jerzewska, et al., Inst. Przemyslu Miesnego i Tluszczowego, Warsaw, Pol., Tluszcze Jadalne (2001), 36(3/4), 97-110. In this process of the invention, enzymatic degumming of hydrated low-erucic acid rapeseed oil is by use of a phospholipase A2 of the invention. The enzyme can catalyze the hydrolysis of fatty acid ester linkages to the central carbon atom of the glycerol moiety in phospholipids. It can hydrolyze non-hydratable phospholipids to their corresponding hydratable lyso-compounds. With a nonpurified enzyme preparation, better results can be achieved with the addition of 2% preparation for 4 hours (87% P removal).

[0579] In another exemplary process of the invention for oil degumming (or an oil degumming process using an enzyme of the invention), an acidic polymer, e.g., an alginate or pectin, is added. In this oil degumming process of the invention, an acidic polymer (e.g. alginic acid or pectin or a more soluble salt form) is added to the crude oil with a low amount of water (e.g., in a range of between about 0.5 to 5%). In this aspect, the acidic polymers can reduce and/or disrupt phospholipid-metal complexes by binding calcium and/or magnesium in the crude oil, thereby improving the solubility of nonhydratable phospholipids. In one aspect, these phospholipids will enter the aqueous phase and either be converted to diacylglycerol and the corresponding side chain or the intact phospholipid will be removed by subsequent centrifugation as a component of the heavy phase. The presence of the acidic polymer in the aqueous phase can also increase the density of the aqueous phase and result in an improved separation of the heavy phase from the oil (light) phase.

[0580] One exemplary process of the invention for oil degumming (or an oil degumming process using an enzyme of the invention) alters the deodorization procedure to get a diacylglycerol (DAG) fraction. In alternative aspect, if necessary or desired, following enzyme-assisted degumming, the deodorization conditions (temperature, pressure, configuration of the distillation apparatus) can be modified with the goal of improving the separation of the free fatty acids (FFA) from the diacylglycerol/triacylglycerol fraction or further modified to separate the diacylglycerol from the triacylglycerol fraction. As a result of these modifications, using this method of the invention, it is possible to obtain food grade FFA and diacylglycerol if a hydrolase of the invention (e.g., a phosphatase, or, a PLC or a combination of PLC and phosphatases) are used to degum edible oil in a physical refining process.

[0581] In various aspects, practicing the methods of the invention as described herein (or using the enzymes of the invention), have advantages such as: decrease or eliminate solvent and solvent recovery; lower capital costs; decrease downstream refining costs, decrease chemical usage, equipment, process time, energy (heat) and water usage/wastewater generation; produce higher quality oil; expeller pressed oil may be used without refining in some cooking and sauteing applications (this pressed oil may have superior stability, color and odor characteristics and high tocopherol content); produce higher quality meal; produce a lower fat content in meal (currently, meal coming out of mechanical press causes digestion problems in ruminants); produce improved nutritional attributes—reduced levels of glucosinolates, tannins, sinapine, phytic acid (as described, e.g., in Technology and Solvents for Extracting Oilseeds and Nonpetroleum Oils, AOCS 1997).

[0582] In one aspect, the invention provides methods for refining vegetable oils (e.g., soybean oil, corn oil, cottonseed oil, palm oil, peanut oil, rapeseed oil, safflower oil, sunflower seed oil, sesame seed oil, rice bran oil, coconut oil or canola oil) and their byproducts, and processes for deodorizing lecithin, for example, as described in U.S. Pat. No. 6,172,248, or 6,172,247, wherein the methods comprise use of at least one hydrolase of the invention, e.g., a phospholipase, such as a phospholipase C of the invention. Thus, the invention provides lecithin and vegetable oils comprising at least one enzyme of the invention. In an exemplary organic acid refining process, vegetable oil is combined with a dilute aqueous organic acid solution and subjected to high shear to finely disperse the acid solution in the oil. The resulting acid-and-oil mixture is mixed at low shear for a time sufficient to sequester contaminants into a hydrated impurities phase, producing a purified vegetable oil phase. In this exemplary process, a mixer or recycle system (e.g., recycle water tank) and/or a phosphatide or lecithin storage tank can be used, e.g., as described in U.S. Pat. No. 4,240,972, 4,049,686, 6,172,247 or 6,172,248. These processes can be conducted as a batch or continuous process. Crude or degummed vegetable oil can be supplied from a storage tank (e.g., through a pump) and can be heated. The vegetable oil to be purified can be either crude or “degummed” oil.

[0583] In one aspect, hydrolase enzymes such as the phosphatidylinositol-PLC (PI-PLC) enzymes of the invention are used for vegetable oil degumming. Hydrolase enzymes of the invention having PI-PLC activity can be used alone or in combination with other enzymes (for instance PLC, PLD, phosphatase enzymes of the invention) to improve oil yield during the degumming of vegetable oils (including soybean, canola, and sunflower).

[0584] The PI-PLC enzymes of the invention may preferentially convert phosphatidylinositol to 1,2-diacylglycerol (DAG) and phosphoinositol but it may also demonstrate activity on other phospholipids including phosphatidylcholine, phosphatidylethanolamine, phosphatidylserine, or phosphatidic acid. The improvement in yield will be realized as an increase in the amount of DAG in the enzyme-treated vegetable oil and an increase in neutral oil, due to a decrease in the amount of oil entrained in the smaller gum fraction that results from enzyme treatment of the vegetable oil.

[0585] Purification of Phytosterols from Vegetable Oils

[0586] The invention provides methods for purification of phytosterols and triterpenes, or plant sterols, from vegetable oils using the enzymes of the invention. Phytosterols that can be purified using enzymes (e.g., phospholipases) and methods of the invention include β-sitosterol, campesterol, stigmasterol, stigmastanol, β-sitostanol, sitostanol, desmosterol, chalinasterol, poriferasterol, clionasterol and brassicasterol. Plant sterols are important agricultural products for health and nutritional industries. Thus, enzymes and methods of the invention are used to make emulsifiers for cosmetic manufacturers and steroidal intermediates and precursors for the production of hormone pharmaceuticals. Enzymes and methods of the invention are used to make (e.g., purify) analogs of phytosterols and their esters for use as cholesterol-lowering agents with cardiologic health benefits. Enzymes and methods of the invention are used to purify plant sterols to reduce serum cholesterol levels by inhibiting cholesterol absorption in the intestinal lumen. Enzymes and methods of the invention are used to purify plant sterols that have immunomodulating properties at extremely low concentrations, including enhanced cellular response of T lymphocytes and cytotoxic ability of natural killer cells against a cancer cell line. Enzymes and methods of the invention are used to purify plant sterols for the treatment of pulmonary tuberculosis, rheumatoid arthritis, management of HIV-infested patients and inhibition of immune stress, e.g., in marathon runners.

[0587] Enzymes and methods of the invention are used to purify sterol components present in the sterol fractions of commodity vegetable oils (e.g., coconut, canola, cocoa butter, corn, cottonseed, linseed, olive, palm, peanut, rice bran, safflower, sesame, soybean, sunflower oils), such as sitosterol (40.2-92.3%), campesterol (2.6-38.6%), stigmasterol (0-31%) and 5-avenasterol (1.5-29%).

[0588] Methods of the invention can incorporate isolation of plant-derived sterols in oil seeds by solvent extraction with chloroform-methanol, hexane, methylene chloride, or acetone, followed by saponification and chromatographic purification for obtaining enriched total sterols. Alternatively, the plant samples can be extracted by supercritical fluid extraction with supercritical carbon dioxide to obtain total lipid extracts from which sterols can be enriched and isolated. For subsequent characterization and quantification of sterol compounds, the crude isolate can be purified and separated by a wide variety of chromatographic techniques including column chromatography (CC), gas chromatography, thin-layer chromatography (TLC), normal phase high-performance liquid chromatography (HPLC), reversed-phase HPLC and capillary electrochromatography. Of all chromatographic isolation and separation techniques, CC and TLC procedures employ the most accessible, affordable and suitable for sample clean up, purification, qualitative assays and preliminary estimates of the sterols in test samples.

[0589] Phytosterols are lost in the vegetable oils lost as byproducts during edible oil refining processes. Phospholipases and methods of the invention use phytosterols isolated from such byproducts to make phytosterol-enriched products isolated from such byproducts. Phytosterol isolation and purification methods of the invention can incorporate oil processing industry byproducts and can comprise operations such as molecular distillation, liquid-liquid extraction and crystallization.

[0590] Methods of the invention can incorporate processes for the extraction of lipids to extract phytosterols. For example, methods of the invention can use nonpolar solvents as hexane (commonly used to extract most types of vegetable oils) quantitatively to extract free phytosterols and phytosteryl fatty-acid esters. Steryl glycosides and fatty-acylated steryl glycosides are only partially extracted with hexane, and increasing polarity of the solvent gave higher percentage of extraction. One procedure that can be used is the Bligh and Dyer chloroform-methanol method for extraction of all sterol lipid classes, including phospholipids. One exemplary method to both qualitatively separate and quantitatively analyze phytosterol lipid classes comprises injection of the lipid extract into HPLC system.

[0591] Enzymes and methods of the invention can be used to remove sterols from fats and oils, as described, e.g., in U.S. Pat. No. 6,303,803. This is a method for reducing sterol content of sterol-containing fats and oils. It is an efficient and cost effective process based on the affinity of cholesterol and other sterols for amphipathic molecules that form hydrophobic, fluid bilayers, such as phospholipid bilayers. Aggregates of phospholipids are contacted with, for example, a sterol-containing fat or oil in an aqueous environment and then mixed. The molecular structure of this aggregated phospholipid mixture has a high affinity for cholesterol and other sterols, and can selectively remove such molecules from fats and oils. The aqueous separation mixture is mixed for a time sufficient to selectively reduce the sterol content of the fat/oil product through partitioning of the sterol into the portion of phospholipid aggregates. The sterol-reduced fat or oil is separated from the aqueous separation mixture. Alternatively, the correspondingly sterol-enriched fraction also may be isolated from the aqueous separation mixture. These steps can be performed at ambient temperatures, costs involved in heating are minimized, as is the possibility of thermal degradation of the product. Additionally, a minimal amount of equipment is required, and since all required materials are food grade, the methods require no special precautions regarding handling, waste disposal, or contamination of the final product(s).

[0592] Enzymes and methods of the invention can be used to remove sterols from fats and oils, as described, e.g., in U.S. Pat. No. 5,880,300. Phospholipid aggregates are contacted with, for example, a sterol-containing fat or oil in an aqueous environment and then mixed. Following adequate mixing, the sterol-reduced fat or oil is separated from the aqueous separation mixture. Alternatively, the correspondingly sterol-enriched phospholipid also may be isolated from the aqueous separation mixture. Plant (e.g., vegetable) oils contain plant sterols (phytosterols) that also may be removed using the methods of the present invention. This method is applicable to a fat/oil product at any stage of a commercial processing cycle. For example, the process of the invention may be applied to refined, bleached and deodorized oils (“RBD oils”), or to any stage of processing prior to attainment of RBD status. Although RBD oil may have an altered density compared to pre-RBD oil, the processes of the are readily adapted to either RBD or pre-RBD oils, or to various other fat/oil products, by variation of phospholipid content, phospholipid composition, phospholipid:water ratios, temperature, pressure, mixing conditions, and separation conditions as described below.

[0593] Alternatively, the enzymes and methods of the invention can be used to isolate phytosterols or other sterols at intermediate steps in oil processing. For example, it is known that phytosterols are lost during deodorization of plant oils. A sterol-containing distillate fraction from, for example, an intermediate stage of processing can be subjected to the sterol-extraction procedures described above. This provides a sterol-enriched lecithin or other phospholipid material that can be further processed in order to recover the extracted sterols.

[0594] Nutraceuticals

[0595] In one aspect, the compositions and methods of the invention can be used to make nutraceuticals by processing or synthesizing lipids and oils using the enzymes of the invention, e.g., hydrolases, such as esterases, acylases, lipases, phospholipases or proteases of the invention. In one aspect, the processed or synthesized lipids or oils include poly-unsaturated fatty acids (PUFAs), diacylglycerides, e.g., 1,3-diacyl glycerides (DAGs), monoacylglycerides, e.g., 2-monoacylglycerides (MAGs) and triacylglycerides (TAGs). In one aspect, the nutraceuticals is made by processing diacylglycerides, e.g., 1,3-diacyl glycerides (DAGs), monoacylglycerides, e.g., 2-monoacylglycerides (MAGs) and/or triacylglycerides (TAGs) from plant (e.g., oilseed) sources or from animal (e.g., fish oil) sources.

[0596] In one aspect, the compositions and methods of the invention can be used to fortify dietary compositions, especially cow's milk based products, e.g., cow's milk-based infant formulas, with bile salt-activated hydrolases. The compositions made by the methods and compositions of the invention can be used to feed newborn and premature infants, including administration of a bile salt-activated hydrolase of the invention to increase fat digestion and therefore growth rate. Similarly, the invention provides compositions and methods for treating subjects for inadequate pancreatic enzyme production by administration of bile salt-activated hydrolase in conjunction with ingestion of fats; see also discussion, below.

[0597] In one aspect, the invention provides a dietary composition comprising a hydrolase of the invention, e.g., bile salt-activated hydrolase of the invention. In one aspect, the invention provides a dietary composition comprising a nutritional base comprising a fat and an effective amount of bile salt-activated hydrolase of the invention. In one aspect, the invention provides a cow's milk-based infant formula comprising a hydrolase of the invention, e.g., bile salt-activated hydrolase of the invention. In one aspect, the hydrolase of the invention is active in the digestion of long chain fatty acids, e.g., C₁₂ to C₂₂, which make up a very high percentage of most milks, e.g., 99% of human breast milk. See, e.g., U.S. Pat. No. 5,000,975.

[0598] In one aspect, the invention provides a dietary composition comprising a vegetable oil fat and a hydrolase of the invention. The invention provides methods of processing milk based products and/or vegetable oil-comprising compositions to make dietary compositions. In one aspect, the processed compositions comprise a lauric acid oil, an oleic acid oil, a palmitic acid oil and/or a linoleic acid oil. In one aspect, a rice bran oil, sunflower oleic oil and/or canola oil may be used as oleic acids oils. In one aspect, fats and oils, e.g., oilseeds, from plants, including, e.g., rice, canola, sunflower, olive, palm, soy or lauric type oils for use in the nutraceuticals and dietary compositions are processed or made using a hydrolase of the invention. See, e.g., U.S. Pat. No. 4,944,944.

[0599] In one aspect, the enzymes of the invention are provided in a form that is stable to storage in the formula and/or the stomach, but active when the formulation reaches the portion of the gastrointestinal tract where the formula would normally be digested. Formulations (e.g., microcapsules) for release in the intestine are well known in the art, e.g., biodegradable polymers such as polylactide and polyglycolide, as described, e.g., in U.S. Pat. Nos. 4,767,628; 4,897,268; 4,925,673; 5,902,617.

[0600] Confectionaries, Cacao Butter and Foods

[0601] In one aspect, the compositions (e.g., enzymes of the invention having hydrolase activity) and methods of the invention can be used to make and process hard butters, such as cacao butter (cocao butter). The compositions and methods of the invention can be used to make cocoa butter alternatives by “structured” synthetic techniques using the enzymes of the invention, e.g., hydrolases, such as esterases, acylases, lipases, phospholipases or proteases of the invention. For example, in one aspect, the compositions (e.g., enzymes of the invention having hydrolase activity) or methods of the invention process or synthesize triacylglycerides, diacylglycerides and/or monoacylglycerides for use as, e.g., cocoa butter alternatives. In one aspect, the methods of the invention generate a hard butter with a defined “plastic region” to maintain sufficient hardness below or at room temperature. In one aspect, the processed or synthesized lipid is designed to have a very narrow “plastic region,” e.g., in one aspect, where it rapidly melts at about body temperature. Natural cacao butter begins to soften at approximately 30° C. to 32° C., and completely melts at approximately 36° C. Natural cacao butter can contain 70 wt % or more of three 1,3-disaturated-2-oleoyl glycerols, which are 1,3-dipalmitoyl-2-oleoyl glycerol (POP), 1-palmitoyl-2-oleoyl glycerol (POSt) and 1,3-distearoyl-2-oleoyl glycerol (StOSt). These three glycerols show a similar melting behavior to each other and are responsible for melting properties of the cacao butter, exhibiting a very narrow plastic region. The invention provides synthetic cacao butters or processed cacao butters (synthesized or processed using a hydrolase of the invention, all possible composition are referred to as cocoa-butter alternatives) with varying percentages of 1,3-dipalmitoyl-2-oleoyl glycerol (POP), 1-palmitoyl-2-oleoyl glycerol (POSt) and 1,3-distearoyl-2-oleoyl glycerol (StOSt), depending on the desired properties of the synthetic cacao butter, and, synthetic cacao butters with more or less than 70 wt % of the three 1,3-disaturated-2-oleoyl glycerols. The synthetic cacao butters of the invention can partially or completely replace natural or unprocessed cacao butters and can maintain or improve essential hard butter properties.

[0602] The invention provides synthetic cacao butters or processed cacao butters (synthesized or processed using a hydrolase of the invention) with desired properties for use in confectionary, bakery and pharmaceutical products. In one aspect, the invention provides confectionary, bakery and pharmaceutical products comprising a hydrolase of the invention. In one aspect, the methods of the invention make or process a lipid (a fat) from a confection (e.g., a chocolate) or to be used in a confection. In one aspect, a lipid is made or processed such that the chocolate shows less finger-imprinting than chocolate made from natural cocoa butter, while still having sharp melting characteristics in the mouth. In one aspect, a lipid is made or processed such that a confection (e.g., chocolate) can be made at a comparatively high ambient temperature, or, be made using a cooling water at a comparatively high temperature. In one aspect, the lipid is made or processed such that a confection (e.g., chocolate) can be stored under relatively warmer conditions, e.g., tropical or semi-tropical conditions or in centrally heated buildings. In one aspect, the lipids are made or processed such that a confection (e.g., chocolate) will have a lipid (fat) content of consistent composition and quality. The enzymes of the invention can be used to provide a substitute composition for cacao butter which can significantly improve its thermal stability and replace it in a wide range of applications.

[0603] Margarine and Shortening Production

[0604] The invention provides synthetic or processed fats, e.g., margarine and shortening synthesized or processed using a hydrolase of the invention. In one aspect, the invention generates processed fats comprising a vegetable oil, such as soybean oil, corn oil, rapeseed oil, palm oil or lauric type oils synthesized or processed using a hydrolase of the invention. The resulting synthetic or processed fats (made using the enzymes of the invention), e.g., margarine and shortening, are designed to have a desired “plasticity.”Many of the plastic fat products, such as margarine and shortening, are produced from hard stocks and liquid oils as raw materials. For example, liquid oils such as soybean oil, corn oil, palm oil and rapeseed oil, are blended with their hardened oils (hard stocks), and the blend is adjusted to have an appropriate consistency (plasticity). The plastic fat products such as margarine and shortening so produced tend to cause the formation of relatively coarse crystallines because fats and oils used as the raw materials are composed of fatty acids having almost the same carbon chain length. In other words, they have a highly-unified composition of fatty acids. For this reason, the plasticity of these products can be maintained at an appropriate degree only within a narrow temperature range, so that the liquid oils contained therein have a tendency to exude. In one aspect, the invention provides methods of making or processing fats designed such that they have a varied (and defined) composition of fatty acids. The resultant oil, e.g., margarine or shortening, can have a broader range of plasticity.

[0605] In one aspect, the methods and compositions of the invention are used to make or process vegetable oils, such as soybean oil, corn oil, rapeseed oil, palm oil or lauric type oils using the hydrolases of the invention, including inter-esterification and enzymatic transesterification, see e.g., U.S. Pat. No. 5,288,619. The methods and compositions of the invention can be used in place of random inter-esterification as described in, e.g., U.S. Pat. No. 3,949,105. In one aspect, the methods and compositions of the invention are used to in enzymatic transesterification for preparing an oil, e.g., a margarine oil, having both low trans-acid and low intermediate chain fatty acid content.

[0606] In one aspect, the symmetric structure of an oil, e.g., a palm or lauric type oils is modified, e.g., into a random structure. Thus, the methods of the invention can be used to modify the properties of plastic fat products. In one aspect, the modification of oils by the methods of the invention can be designed to prevent or slow gradually hardening of the oil with time, particularly when the products are being stored.

[0607] In one aspect, the methods and compositions of the invention in a trans-esterification reaction mixture comprising a stearic acid source material and an edible liquid vegetable oil, trans-esterifying the stearic acid source material and the vegetable oil using a 1-, 3-positionally specific lipase of the invention, and then hydrogenating the fatty acid mixture to provide a recycle stearic acid source material for a recyclic reaction with the vegetable oil. See e.g., U.S. Pat. No. 5,288,619.

[0608] In one aspect, an inter-esterification reaction is conducted with a lipase of the invention. In one aspect, the lipase of the invention has a selectivity for the 1- and 3-positions of triglyceride to slow or inhibit an increase in the amount of tri-saturated triglycerides in the oil. In this reaction of the invention, deficiencies of conventional random inter-esterification and the difficulty of inter-esterification with a non-specific lipase can be overcome because the inter-esterification is conducted by an enzyme of the invention having a specificity for the 1- and 3-positions of triglycerides. In one aspect, the exudation of liquid oils contained in the products is slowed or prevented with a temperature increase in the reaction to inhibit a rise in the melting point caused by an increase in the amount of tri-saturated triglycerides. This addresses the problem of hardening of products during long-term storage.

[0609] Latex Processing

[0610] The methods and compositions (e.g., enzymes of the invention, e.g., hydrolases, such as esterases, acylases, lipases, phospholipases or proteases of the invention) of the invention can be used to selectively hydrolyze saturated esters over unsaturated esters into acids or alcohols. In one aspect, the invention provides for the selective hydrolysis of ethyl propionate over ethyl acrylate. In one aspect, these methods are used to remove undesired esters from monomer feeds used in latex polymerization and from the latexes after polymerization. The methods and compositions (hydrolases) of the invention can be used to treat latexes for a variety of purposes, e.g., to treat latexes used in hair fixative compositions to remove unpleasant odors. Latexes treated by the methods and compositions of the invention include, e.g., polymers containing acrylic, vinyl and unsaturated acid monomers, including alkyl acrylate monomers such as methyl acrylate, ethyl acrylate, propyl acrylate and butyl acrylate, and acrylate acids such as acrylic acid, methacrylic acid, crotonic acid, itaconic acid and mixtures thereof. See, e.g., U.S. Pat. No. 5,856,150.

[0611] Treating Hydrolase Deficiencies

[0612] The methods and compositions (enzymes of the invention, e.g., hydrolases, such as esterases, acylases, lipases, phospholipases or proteases of the invention) of the invention can be used in the treatment of a hydrolase deficiency in an animal, e.g., a mammal, such as a human. For example, in one aspect, the methods and compositions of the invention are used to treat patients suffering from a deficiency of a pancreatic lipase. In one aspect, the lipase is administered orally. An enzyme of the invention can be delivered in place of or with a preparation of pig pancreas enzyme.

[0613] In one aspect, the compositions of the invention used for these treatments are active under acidic conditions. In one aspect, the compositions of the invention are administered orally in formulations (e.g., tablets) that pass through the acid regions of the stomach and discharge the enzyme only in the relatively alkaline environment of the jejunum. In one aspect, a hydrolase of the invention is formulated with a carrier such as lactose, saccharose, sorbitol, mannitol, starch, cellulose derivatives or gelatine or any other such excipient. A lubricant such as magnesium stearate, calcium stearate or polyethylene glycol wax also can be added. A concentrated sugar solution, which may contain additives such as talc, titanium dioxide, gelatine or gum Arabic, can be added as a coating. Soft or hard capsules can be used to encapsulate a hydrolase as a liquid or as a solid preparation. See, e.g., U.S. Pat. Nos. 5,691,181; 5,858,755.

[0614] Detergents

[0615] The methods and compositions (enzymes of the invention, e.g., hydrolases; such as esterases, acylases, lipases, phospholipases or proteases of the invention) of the invention can be used in making and using detergents. A hydrolase of the invention can be added to, e.g., be blended with, any known detergent composition, solid or liquid, with or without changing the composition of the detergent composition. For examples, a hydrolase of the invention can be added to any soap, e.g., aliphatic sulfates such as straight or branched chain alkyl or alkenyl sulfates, amide sulfates, alkyl or alkenyl ether sulfates having a straight or branched chain alkyl or alkenyl group to which one or more of ethylene oxide, propylene oxide and butylene oxide added, aliphatic sulfonates such as alkyl sulfonates, amide sulfonates, dialkyl sulfosuccinates, sulfonates of alpha-olefins, of vinylidene-type olefins and of internal olefins, aromatic sulfonates such as straight or branched chain alkylbenzenesulfonates, alkyl or alkenyl ether carbonates or amides having a straight or branched chain alkyl or alkenyl group to which one or more of ethylene oxide, propylene oxide and butylene oxide added, or amides, alpha-sulfo-fatty acid salts or esters, amino acid type surfactants, phosphate surfactants such as alkyl or alkenyl acidic phosphates, and alkyl or alkenyl phosphates, sulfonic acid type amphoteric surfactants, betaine type amphoteric surfactants, alkyl or alkenyl ethers or alcohols having a straight or branched chain alkyl or alkenyl group to which one or more of ethylene oxide, propylene oxide and butylene oxide added, polyoxy-ethylenealkyl phenyl ethers having a straight or branched chain alkyl group to which one or more of ethylene oxide, propylene oxide and butylene oxide added, higher fatty acid alkanolamides or alkylene oxide adducts thereof, sucrose fatty acid esters, fatty acid glycerol monoesters, alkyl- or alkenyl-amine oxides, tetraalkyl-ammonium salt type cationic surfactants, or a combination thereof. See, e.g., U.S. Pat. No. 5,827,718.

[0616] The invention provides detergent compositions comprising one or more polypeptides (hydrolases) of the invention. Surface-active and/or non-surface-active forms can be used. In one aspect, the amount of total hydrolase, surface-active and/or non-surface-active, used in the invention can be from about 0.0001% to about 1.0%, or from about 0.0002% to about 0.5%, by weight, of the detergent composition. In one aspect, of the detergent composition, the surface-active hydrolase is from about 5% to about 67% and the non-surface-active hydrolase is from about 33% to about 95% of the total hydrolase activity in the enzymatic mixture. In one aspect, the optimum pH of the total enzymatic mixture is between about 5 to about 10.5.

[0617] In one aspect, the detergent compositions of the invention include alkaline hydrolases of the invention which function at alkaline pH values, since the pH of a washing solution can be in an alkaline pH range under ordinary washing conditions. See, e.g., U.S. Pat. No. 5,454,971

[0618] The polypeptides of the invention (enzymes of the invention, e.g., hydrolases, such as esterases, acylases, lipases, phospholipases or proteases of the invention) can be used in any detergent composition, which are well known in the art, see, e.g., U.S. Pat. Nos. 5,069,810; 6,322,595; 6,313,081. For example, in one aspect, a laundry detergent composition is provided. It can comprise 0.8 ppm to 80 ppm of a lipase of the invention.

[0619] The invention incorporates all methods of making and using detergent compositions, see, e.g., U.S. Pat. Nos. 6,413,928; 6,399,561; 6,365,561; 6,380,147.

[0620] The invention incorporates all methods of making and using detergent compositions, see, e.g., U.S. Pat. Nos. 6,413,928; 6,399,561; 6,365,561; 6,380,147. The detergent compositions can be a one and two part aqueous composition, a non-aqueous liquid composition, a cast solid, a granular form, a particulate form, a compressed tablet, a gel and/or a paste and a slurry form. The hydrolases of the invention can also be used as a detergent additive product in a solid or a liquid form. Such additive products are intended to supplement or boost the performance of conventional detergent compositions and can be added at any stage of the cleaning process.

[0621] The invention also provides methods capable of removing gross food soils, films of food residue and other minor food compositions using these detergent compositions. Hydrolases of the invention can facilitate the removal of stains by means of catalytic hydrolysis of proteins. Hydrolases of the invention can be used in dishwashing detergents in textile laundering detergents.

[0622] The actual active enzyme content depends upon the method of manufacture of a detergent composition and is not critical, assuming the detergent solution has the desired enzymatic activity. In one aspect, the amount of hydrolases present in the final solution ranges from about 0.001 mg to 0.5 mg per gram of the detergent composition. The particular enzyme chosen for use in the process and products of this invention depends upon the conditions of final utility, including the physical product form, use pH, use temperature, and soil types to be degraded or altered. The enzyme can be chosen to provide optimum activity and stability for any given set of utility conditions. In one aspect, the hydrolases of the present invention are active in the pH ranges of from about 4 to about 12 and in the temperature range of from about 20° C. to about 95° C. The detergents of the invention can comprise cationic, semi-polar nonionic or zwitterionic surfactants; or, mixtures thereof.

[0623] Enzymes of the invention can be formulated into powdered and liquid detergents having pH between 4.0 and 12.0 at levels of about 0.01 to about 5% (preferably 0.1% to 0.5%) by weight. These detergent compositions can also include other enzymes such as proteases, cellulases, lipases or endoglycosidases, endo-beta.-1,4-glucanases, beta-glucanases, endo-beta-1,3(4)-glucanases, cutinases, peroxidases, laccases, amylases, glucoamylases, pectinases, reductases, oxidases, phenoloxidases, ligninases, pullulanases, arabinanases, hemicellulases, mannanases, xyloglucanases, xylanases, pectin acetyl esterases, rhamnogalacturonan acetyl esterases, polygalacturonases, rhamnogalacturonases, galactanases, pectin lyases, pectin methylesterases, cellobiohydrolases and/or transglutaminases. These detergent compositions can also include builders and stabilizers.

[0624] The addition of hydrolases of the invention to conventional cleaning compositions does not create any special use limitation. In other words, any temperature and pH suitable for the detergent is also suitable for the compositions of the invention as long as the enzyme is active at or tolerant of the pH and/or temperature of the intended use. In addition, the proteases of the invention can be used in a cleaning composition without detergents, again either alone or in combination with builders and stabilizers.

[0625] The present invention provides cleaning compositions including detergent compositions for cleaning hard surfaces, detergent compositions for cleaning fabrics, dishwashing compositions, oral cleaning compositions, denture cleaning compositions, and contact lens cleaning solutions.

[0626] In one aspect, the invention provides a method for washing an object comprising contacting the object with a polypeptide of the invention under conditions sufficient for washing. A hydrolase of the invention may be included as a detergent additive. The detergent composition of the invention may, for example, be formulated as a hand or machine laundry detergent composition comprising a polypeptide of the invention. A laundry additive suitable for pre-treatment of stained fabrics can comprise a polypeptide of the invention. A fabric softener composition can comprise a hydrolase of the invention. Alternatively, a hydrolases of the invention can be formulated as a detergent composition for use in general household hard surface cleaning operations. In alternative aspects, detergent additives and detergent compositions of the invention may comprise one or more other enzymes such as a protease, a lipase, a cutinase, another protease, a carbohydrase, a cellulase, a pectinase, a mannanase, an arabinase, a galactanase, a xylanase, an oxidase, e.g., a lactase, and/or a peroxidase (see also, above). The properties of the enzyme(s) of the invention are chosen to be compatible with the selected detergent (i.e. pH-optimum, compatibility with other enzymatic and non-enzymatic ingredients, etc.) and the enzyme(s) is present in effective amounts. In one aspect, enzymes of the invention are used to remove malodorous materials from fabrics. Various detergent compositions and methods for making them that can be used in practicing the invention are described in, e.g., U.S. Pat. Nos. 6,333,301; 6,329,333; 6,326,341; 6,297,038; 6,309,871; 6,204,232; 6,197,070; 5,856,164.

[0627] When formulated as compositions suitable for use in a laundry machine washing method, the hydrolases of the invention can comprise both a surfactant and a builder compound. They can additionally comprise one or more detergent components, e.g., organic polymeric compounds, bleaching agents, additional enzymes, suds suppressors, dispersants, lime-soap dispersants, soil suspension and anti-redeposition agents and corrosion inhibitors. Laundry compositions of the invention can also contain softening agents, as additional detergent components. Compositions containing hydrolases of the invention can provide fabric cleaning, stain removal, whiteness maintenance, softening, color appearance, dye transfer inhibition and sanitization when formulated as laundry detergent compositions.

[0628] The density of the laundry detergent compositions of the invention can range from about 200 to 1500 g/liter, or, about 400 to 1200 g/liter, or, about 500 to 950 g/liter, or, 600 to 800 g/liter, of composition; this can be measured at about 20° C.

[0629] The “compact” form of laundry detergent compositions of the invention is best reflected by density and, in terms of composition, by the amount of inorganic filler salt. Inorganic filler salts are conventional ingredients of detergent compositions in powder form. In conventional detergent compositions, the filler salts are present in substantial amounts, typically 17% to 35% by weight of the total composition. In one aspect of the compact compositions, the filler salt is present in amounts not exceeding 15% of the total composition, or, not exceeding 10%, or, not exceeding 5% by weight of the composition. The inorganic filler salts can be selected from the alkali and alkaline-earth-metal salts of sulphates and chlorides, e.g., sodium sulphate.

[0630] Liquid detergent compositions of the invention can also be in a “concentrated form.” In one aspect, the liquid detergent compositions can contain a lower amount of water, compared to conventional liquid detergents. In alternative aspects, the water content of the concentrated liquid detergent is less than 40%, or, less than 30%, or, less than 20% by weight of the detergent composition. Detergent compounds of the invention can comprise formulations as described in WO 97/01629.

[0631] Hydrolases of the invention can be useful in formulating various cleaning compositions. A number of known compounds are suitable surfactants including nonionic, anionic, cationic, or zwitterionic detergents, can be used, e.g., as disclosed in U.S. Pat. Nos. 4,404,128; 4,261,868; 5,204,015. In addition, enzymes of the invention can be used, for example, in bar or liquid soap applications, dish care formulations, contact lens cleaning solutions or products, peptide hydrolysis, waste treatment, textile applications, as fusion-cleavage enzymes in protein production, and the like. Hydrolases of the invention may provide enhanced performance in a detergent composition as compared to another detergent protease, that is, the enzyme group may increase cleaning of certain enzyme sensitive stains such as grass or blood, as determined by usual evaluation after a standard wash cycle. Hydrolases of the invention can be formulated into known powdered and liquid detergents having pH between 6.5 and 12.0 at levels of about 0.01 to about 5% (for example, about 0.1% to 0.5%) by weight. These detergent cleaning compositions can also include other enzymes such as other known esterases, phospholipases, proteases, amylases, cellulases, lipases or endoglycosidases, as well as builders and stabilizers.

[0632] Processes for Coating and Finishing Fabrics

[0633] The methods and compositions (enzymes of the invention, e.g., hydrolases, such as esterases, acylases, lipases, phospholipases or proteases of the invention) of the invention can be used in processes for coating and finishing fabrics, fibers or yarns. In one aspect, insoluble cellulosic polymers are reacted with carboxylic acids or esters thereof in the presence of a hydrolase of the invention. The cellulosic polymer may be cotton, viscose, rayon, lyocell, flax, linen, ramie, and all blends thereof; and blends thereof with polyesters, wool, polyamides, acrylics and polyacrylics. In alternative aspects, the methods and compositions (hydrolases) of the invention can be used in a softening finish process, i.e. improvement of the hand and drape of the final fabric, for dyeing a polymeric material, for obtaining flame retardancy, for obtaining water repellency, for obtaining brightness, e.g. optical brightness, of a polymeric material, and for obtaining resin finishing (“permanent press”). In one aspect, the methods and compositions (hydrolases) of the invention can be used for obtaining flame retardancy in a fabric using, e.g., a halogen-substituted carboxylic acid or an ester thereof, i.e. a fluorinated, chlorinated or bromated carboxylic acid or an ester thereof. In one aspect, the processes are carried out under conditions (e.g. temperature, pH, solvent) that favors the esterification process over hydrolytic cleavage of an ester bend. In one aspect, the esterification process is carried out using water as a solvent, or, the process may be carried out without a solvent, or, the reaction may take place in a microemulsion formed by adding an carboxylic acid or an ester thereof to a mixture of water and a suitable surfactant. See, e.g., U.S. Pat. No. 5,733,750.

[0634] In one aspect, a hydrolase of the invention is absorbed or adsorbed or otherwise immobilized on a surface, such as a fabric, fiber or yarn. In one aspect, a fabric-hydrolase complex is formed for, e.g., lipid removal, e.g., food or oil stain removal. The hydrolase may be sorbed on the fabric, fiber or yarn before or after staining. The active hydrolase can hydrolyze the stain on dry fabric, fiber or yarn, or fabric, fiber or yarn in laundering solutions. In one aspect, a hydrolase of the invention has enhanced stability to denaturation by surfactants and to heat deactivation. In the way, the hydrolase can be resistant to removal from the fabric, fiber or yarn during laundering, can retain substantial activity after drying at an elevated temperature, and can retain activity during fabric storage or wear. Redeposition of food, oil and oil hydrolysis by-products during laundering of fabric also can be retarded by a hydrolase of the invention. Oil hydrolysis by-products can be removed during laundering of the fabric, e.g., at a basic pH or in the presence of a surfactant. In one aspect, a hydrolase of the invention is absorbed or adsorbed or otherwise immobilized on a gel, glass, plastic or metal solid as well as a fabric, fiber or yarn.

[0635] In alternative aspects, hydrolases of the invention are useful to treat a wide variety of natural, synthetic or metallic fabrics, including textiles or woven or non-woven cloths, including nylon, polycotton, polyester, woven polyester, double knit polyester, silk, vinyl, cotton flannel, rayon velvet, acrylic felt, wool blend (polyester/wool), synthetic blend (polyester/polyurethane), latexes. Other surfaces that can be treated with a hydrolase of the invention include kitchen or cooking devices and utensils, e.g., pot cleaner materials such as cellulose sponge, nylon and stainless steel scrubbers and copper cloth, dishwashers, food storage devices, e.g., refrigerators, freezers and the like.

[0636] The surfaces that have been treated in accordance with the invention can already be stained by (or carrying) oil before an enzyme-fabric complex is formed or the complex can be formed before such exposure. Examples of embodiments useful for the former applications include pre-wash liquid or gelled compositions that can be sprayed or directly applied to specific areas of oily stains. The garments or linens can then be stored in a laundry hamper, for example, and laundered in the normal course of a household's routine because degradation of the oily stain into hydrolysis by-products will be occurring during storage. Alternatively, fabric may be pretreated before use to convey improved oil stain removal properties. In one aspect, a hydrolase is immobilized on surfaces to facilitate oil removal from the surfaces and to alter wettability of the surfaces. In one aspect, a hydrolase is adsorbed on a fabric before or after an oil stain, and the hydrolase is active to hydrolyze an oil stain on dry fabric or fabric in laundering solutions. In one aspect, the sorbed hydrolase has enhanced stability to denaturation by surfactants and to heat deactivation, is resistant to removal from fabric during laundering, retains substantial activity after drying fabric at an elevated temperature, and/or retains activity during fabric storage or wear. In one aspect, redeposition of oil and oil hydrolysis by-products during laundering of fabric is retarded by the hydrolase. In one aspect, oil hydrolysis by-products are removable during laundering of fabric at a basic pH or in the presence of a surfactant. See, e.g., U.S. Pat. No. 6,265,191.

[0637] Treating Fabrics, Fibers and Textiles

[0638] The invention provides methods of treating textiles, threads, fibers and fabrics using one or more hydrolases of the invention. Thus, in one aspect, the invention provides textiles, threads, fibers and fabrics, and the like, comprising an enzyme of the invention. The hydrolases can be used in any fiber- or fabric-treating method, which are well known in the art, see, e.g., U.S. Pat. Nos. 6,261,828; 6,077,316; 6,024,766; 6,021,536; 6,017,751; 5,980,581; US Patent Publication No. 20020142438 A1. For example, hydrolases of the invention can be used in fiber and/or fabric desizing. In one aspect, the feel and appearance of a fabric is improved by a method comprising contacting the fabric with a hydrolase of the invention in a solution. In one aspect, the fabric is treated with the solution under pressure. For example, hydrolases of the invention can be used in the removal of stains.

[0639] In one aspect, hydrolases of the invention are applied during or after the weaving of textiles, or during the desizing stage, or one or more additional fabric processing steps. During the weaving of textiles, the threads are exposed to considerable mechanical strain. Prior to weaving on mechanical looms, warp yarns are often coated with sizing starch or starch derivatives in order to increase their tensile strength and to prevent breaking. The hydrolases of the invention can be applied to remove these sizing starch or starch derivatives. After the textiles have been woven, a fabric can proceed to a desizing stage. This can be followed by one or more additional fabric processing steps. Desizing is the act of removing “size” from textiles. After weaving, the size coating must be removed before further processing the fabric in order to ensure a homogeneous and wash-proof result. The invention provides a method of desizing comprising enzymatic treatment of the “size” by the action of hydrolases of the invention.

[0640] The enzymes of the invention can be used to desize fabrics, including cotton-containing fabrics, as detergent additives, e.g., in aqueous compositions. The invention provides methods for producing a stonewashed look on indigo-dyed denim fabric and garments. For the manufacture of clothes, the fabric can be cut and sewn into clothes or garments. These can be finished before or after the treatment. In particular, for the manufacture of denim jeans, different enzymatic finishing methods have been developed. The finishing of denim garment normally is initiated with an enzymatic desizing step, during which garments are subjected to the action of amylolytic enzymes in order to provide softness to the fabric and make the cotton more accessible to the subsequent enzymatic finishing steps. The invention provides methods of finishing denim garments (e.g., a “bio-stoning process”), enzymatic desizing and providing softness to fabrics using the hydrolases of the invention. The invention provides methods for quickly softening denim garments in a desizing and/or finishing process.

[0641] Other enzymes can be also be used in these desizing processes. For example, an alkaline and thermostable amylase and hydrolase can be combined in a single bath for desizing and bioscouring. Among advantages of combining desizing and scouring in one step are cost reduction and lower environmental impact due to savings in energy and water usage and lower waste production. Exemplary application conditions for desizing and bioscouring are about pH 8.5 to 10.0 and temperatures of about 40° C. and up. Using a hydrolase of the invention, low enzyme dosages, e.g., about 100 grams (g) per a ton of cotton, and short reaction times, e.g., about 15 minutes, can be used to obtain efficient desizing and scouring with out added calcium.

[0642] In one aspect, an alkaline and thermostable amylase and hydrolase are combined in a single bath desizing and bioscouring. Among advantages of combining desizing and scouring in one step are cost reduction and lower environmental impact due to savings in energy and water usage and lower waste production. Application conditions for desizing and bioscouring can be between about pH 8.5 to pH 10.0 and temperatures at about 40° C. and up. Low enzyme dosages (e.g., about 100 g per a ton of cotton) and short reaction times (e.g., about 15 minutes) can be used to obtain efficient desizing and scouring with out added calcium.

[0643] The hydrolases of the invention can be used in combination with other carbohydrate degrading enzymes, e.g., cellulase, arabinanase, xyloglucanase, pectinase, and the like, for the preparation of fibers or for cleaning of fibers. These can be used in combination with detergents. In one aspect, hydrolases of the invention can be used in treatments to prevent the graying of a textile.

[0644] The hydrolases of the invention can be used to treat any cellulosic material, including fibers (e.g., fibers from cotton, hemp, flax or linen), sewn and unsewn fabrics, e.g., knits, wovens, denims, yarns, and toweling, made from cotton, cotton blends or natural or manmade cellulosics (e.g. originating from xylan-containing cellulose fibers such as from wood chips, wood pulp, groundwood, kraft pulp) or blends thereof. Examples of blends are blends of cotton or rayon/viscose with one or more companion material such as wool, synthetic fibers (e.g. polyamide fibers, acrylic fibers, polyester fibers, polyvinyl alcohol fibers, polyvinyl chloride fibers, polyvinylidene chloride fibers, polyurethane fibers, polyurea fibers, aramid fibers), and cellulose-containing fibers (e.g. rayon/viscose, ramie, hemp, flax/linen, jute, cellulose acetate fibers, lyocell).

[0645] The textile treating processes of the invention (using hydrolases of the invention) can be used in conjunction with other textile treatments, e.g., scouring and bleaching. Scouring is the removal of non-cellulosic material from the cotton fiber, e.g., the cuticle (mainly consisting of waxes) and primary cell wall (mainly consisting of pectin, protein and xyloglucan). A proper wax removal is necessary for obtaining a high wettability. This is needed for dyeing. Removal of the primary cell walls by the processes of the invention improves wax removal and ensures a more even dyeing. Treating textiles with the processes of the invention can improve whiteness in the bleaching process. The main chemical used in scouring is sodium, hydroxide in high concentrations and at high temperatures. Bleaching comprises oxidizing the textile. Bleaching typically involves use of hydrogen peroxide as the oxidizing agent in order to obtain either a fully bleached (white) fabric or to ensure a clean shade of the dye.

[0646] Alkaline Hydrolases

[0647] The invention also provides alkaline hydrolases, i.e., hydrolases active under alkaline conditions, e.g., pH 7.3, pH 7.5 pH 8.0, pH 8.5, pH 9, pH 9.5, pH 10, pH 10.5 or pH 11 or more alkaline. These have wide-ranging applications in textile processing, degumming of plant fibers (e.g., plant bast fibers), treatment of pectic wastewaters, paper-making, and coffee and tea fermentations. See, e.g., Hoondal (2002) Applied Microbiology and Biotechnology 59:409-418.

[0648] Treating Foods and Food Processing

[0649] The hydrolases of the invention have numerous applications in food processing industry. For example, in one aspect, the hydrolases of the invention are used to improve the extraction of oil from oil-rich plant material, e.g., oil-rich seeds, for example, soybean oil from soybeans, olive oil from olives, rapeseed oil from rapeseed and/or sunflower oil from sunflower seeds or rice bran oil. Thus, in one aspect, the invention provides foods, edible or cooking oils, drinks and liquids (e.g., juices, syrups, extracts) and food products, including intermediate products, and the like, comprising hydrolase enzymes (e.g., lipases, esterases, etc.) of the invention. The term “syrup” can be defined as an aqueous solution or slurry comprising carbohydrates such as mono-, oligo- or polysaccharides.

[0650] The hydrolases of the invention can be used for separation of components of plant cell materials. For example, hydrolases of the invention can be used in the separation of protein-rich material (e.g., plant cells) into components, e.g., sucrose from sugar beet or starch or sugars from potato, pulp or hull fractions. In one aspect, hydrolases of the invention can be used to separate protein-rich or oil-rich crops into valuable protein and oil and hull fractions. The separation process may be performed by use of methods known in the art.

[0651] The hydrolases of the invention can be used in the preparation of fruit or vegetable juices, syrups, extracts and the like to increase yield. The hydrolases of the invention can be used in the enzymatic treatment (e.g., hydrolysis of proteins) of various plant cell wall-derived materials or waste materials, e.g. from wine or juice production, or agricultural residues such as vegetable hulls, bean hulls, sugar beet pulp, olive pulp, potato pulp, and the like. The hydrolases of the invention can be used to modify the consistency and appearance of processed fruit or vegetables. The hydrolases of the invention can be used to treat plant material to facilitate processing of plant material, including foods, facilitate purification or extraction of plant components. The hydrolases of the invention can be used to improve feed value, decrease the water binding capacity, improve the degradability in waste water plants and/or improve the conversion of plant material to ensilage, and the like.

[0652] Animal Feeds and Food or Feed Additives

[0653] The invention provides methods for treating animal feeds and foods and food or feed additives using hydrolases of the invention, animals including mammals (e.g., humans), birds, fish and the like. The invention provides animal feeds, foods, and additives comprising hydrolases of the invention. In one aspect, treating animal feeds, foods and additives using hydrolases of the invention can help in the availability of nutrients, e.g., starch, in the animal feed or additive. By breaking down difficult to digest proteins or indirectly or directly unmasking starch (or other nutrients), the hydrolase makes nutrients more accessible to other endogenous or exogenous enzymes. The hydrolase can also simply cause the release of readily digestible and easily absorbed nutrients and sugars.

[0654] Hydrolases of the present invention, in the modification of animal feed or a food, can process the food or feed either in vitro (by modifying components of the feed or food) or in vivo. Hydrolases can be added to animal feed or food compositions containing high amounts of arabinogalactans or galactans, e.g. feed or food containing plant material from soy bean, rape seed, lupin and the like. When added to the feed or food the hydrolase significantly improves the in vivo break-down of plant cell wall material, whereby a better utilization of the plant nutrients by the animal (e.g., human) is achieved. In one aspect, the growth rate and/or feed conversion ratio (i.e. the weight of ingested feed relative to weight gain) of the animal is improved. For example a partially or indigestible galactan-comprising protein is fully or partially degraded by a hydrolase of the invention, e.g. in combination with another enzyme, e.g., beta-galactosidase, to peptides and galactose and/or galacto-oligomers. These enzyme digestion products are more digestible by the animal. Thus, hydrolases of the invention can contribute to the available energy of the feed or food. Also, by contributing to the degradation of galactan-comprising proteins, a hydrolase of the invention can improve the digestibility and uptake of carbohydrate and non-carbohydrate feed or food constituents such as protein, fat and minerals.

[0655] In another aspect, hydrolase of the invention can be supplied by expressing the enzymes directly in transgenic feed crops (as, e.g., transgenic plants, seeds and the like), such as corn, soy bean, rape seed, lupin and the like. As discussed above, the invention provides transgenic plants, plant parts and plant cells comprising a nucleic acid sequence encoding a polypeptide of the invention. In one aspect, the nucleic acid is expressed such that the hydrolase of the invention is produced in recoverable quantities. The hydrolase can be recovered from any plant or plant part. Alternatively, the plant or plant part containing the recombinant polypeptide can be used as such for improving the quality of a food or feed, e.g., improving nutritional value, palatability, and rheological properties, or to destroy an antinutritive factor.

[0656] Paper or Pulp Treatment

[0657] Hydrolases of the invention can be used in paper or pulp treatment or paper deinking, and in making paper (discussed below). Thus, in one aspect, the invention provides wood, wood products, paper, wood or paper pulp, groundwood, TMP, kraft pulp or a finished or intermediate paper product comprising an enzyme of the invention. For example, in one aspect, the invention provides a paper treatment or a paper-making process using hydrolases of the invention. In another aspect, paper components of recycled photocopied paper during chemical and enzymatic deinking processes. In one aspect, hydrolases of the invention can be used in combination with cellulases, pectate lyases or other enzymes. The paper can be treated by the following three processes: 1) disintegration in the presence of hydrolases of the invention, 2) disintegration with a deinking chemical and hydrolases of the invention, and/or 3) disintegration after soaking with hydrolases of the invention. The recycled paper treated with hydrolases can have a higher brightness due to removal of toner particles as compared to the paper treated with just cellulase. While the invention is not limited by any particular mechanism, the effect of hydrolases of the invention may be due to its behavior as surface-active agents in pulp suspension.

[0658] The invention provides methods of treating paper and paper pulp using one or more hydrolases of the invention. The hydrolases of the invention can be used in any paper- or pulp-treating method, which are well known in the art, see, e.g., U.S. Pat. Nos. 6,241,849; 6,066,233; 5,582,681. For example, in one aspect, the invention provides a method for deinking and decolorizing a printed paper containing a dye, comprising pulping a printed paper to obtain a pulp slurry, and dislodging an ink from the pulp slurry in the presence of hydrolases of the invention (other enzymes can also be added). In another aspect, the invention provides a method for enhancing the freeness of pulp, e.g., pulp made from secondary fiber, by adding an enzymatic mixture comprising hydrolases of the invention (can also include other enzymes, e.g., pectate lyase, cellulase, amylase or glucoamylase enzymes) to the pulp and treating under conditions to cause a reaction to produce an enzymatically treated pulp. The freeness of the enzymatically treated pulp is increased from the initial freeness of the secondary fiber pulp without a loss in brightness.

[0659] Paper-Making Enzymes and Processes

[0660] Hydrolases of the invention can be used in paper-making processes. In one aspect, the hydrolases of the invention have a lipase activity capable of hydrolyzing both sterol esters and triglycerides (including palmitic, oleic, linoleic, linolenic and pinolenic acids); in one aspect, these polypeptides are used in paper processing, e.g., to make an “improved” or stronger paper, including paper processing methods for improving paper strength.

[0661] In one aspect, using a hydrolase enzyme of the invention in a paper-making process results in enzymatic strength enhancement and pitch control (decreasing the amount of pitch) in a pulp, including thermomechanical pulp (TMP) (wood crushed with refiners using steam at high pressures and temperatures), a kraft pulp and/or a paper pulp.

[0662] The invention provides an enzyme-based processing aid for increasing mechanical pulp strength and reduction of pitch using, e.g., an enzyme of the invention. The enzymes of the invention can be used with, or in conjunction with, any known paper pulp manufacturing process, e.g., as described by Gutierrez (2001) Trends in Biotechnology, vol. 19, Issue 9, pgs 340-348. The enzymes of the invention can be added in a pre-isolated form (which includes crude extracts, not necessarily purified to any degree), or by adding host cells capable of generating, and in some aspects, secreting, enzymes of the invention, e.g., a bacterial, fungal or a Picha host cell, as described herein.

[0663] The invention provides enzymatic treatments of thermomechanical pulp (TMP) with enzymes of the inventions, including lipolytic enzymes of the invention, which in one aspect have broad substrate specificities, and in one aspect, are compatible with any paper-making process, e.g., these enzymes of the invention are thermotolerant and/or retain activity in alkaline conditions. In one aspect, enzymes of the invention hydrolyze lipophilic extracts such as steryl esters and triglycerides present in the pulp into sterols, glycerol and free fatty acids. This hydrolysis of lipophilic compounds improves the inter-fiber bonding of cellulose fibers within the pulp resulting in stronger paper. In various aspect, benefits of using the enzymes of the invention, or practicing the methods of the invention, in a paper-making process includes reduction of expensive chemical pulp for strength reinforcement, increased addition of fillers (e.g., clay, calcium carbonate) for improved printability (and reduced fiber cost), and/or reduction of pitch-related operational problems.

[0664] One aspect of the paper pulp manufacturing processes of the invention comprises pulping a wood or wood product (e.g., chips, unbleached or incompletely processed pulp, paper waste) to separate fibers by chemical or mechanical means. The resultant pulp can be then bleached by the sequential actions of chemical reagents and alkaline extractions.

[0665] Enzymes of the invention can be added at any point in this process.

[0666] Paper pulp manufacturing processes of the invention can incorporate chemical pulping, mechanical pulping or a combination thereof. In some aspects, chemical pulping results in a higher quality paper but gives a lower yield compared to mechanical pulping (approximately-50% compared to >90% yield). During wood pulping and refining, lipophilic compounds present in the wood are released; and, in one aspect, it is these lipophilic compounds that are further processed (hydrolyzed) using lipase enzymes of the invention.

[0667] By hydrolyzing lipophilic compounds present in cellulose-containing compositions used to make paper (e.g., wood, wood products, paper waste, and the like), the enzymes and processes of the invention also decrease the amount of lipophilic extractives, or “pitch” (including triglycerides, steryl esters, free fatty acids (FFAs), sterols, resin acids) in paper-making and during wood pulping and refining processes. In brief, since lipophilic extractives have poor aqueous solubility, they are not efficiently removed from the pulp in the process water. Instead these lipophilic compounds coalesce to form colloidal droplets that deposit in the pulp and on processing machinery. These so-called “pitch deposits” are responsible for producing spots and holes in paper and can also lead to machine shutdowns. Lipophilic extractives can lead to lower paper strength. Thus, practicing the methods of the invention, and using enzymes of the invention in wood pulping and refining processes, including paper-making processes, results in the generation of pulp with less lipophilic extractives, or “pitch”, including triglycerides, steryl esters, free fatty acids (FFAs), sterols, resin acids; stronger paper (as compared with processing of pulp under similar conditions not using enzymes of the invention); better quality paper (e.g., less paper spotting, fewer holes in the paper); and/or less machinery maintenance and breakdowns (due, e.g., to decreased accumulation of pitch). Thus, in one aspect the enzymes of the invention and the methods of the invention are used to hydrolyze triglycerides, free fatty acids, sterols, sterol esters and resin acids; these compounds are the main lipophilic extractives of wood pulping and refining processes, including paper-making processes. In another aspect, or from another perspective, the enzymes of the invention and the methods of the invention are used to reduce lipophilic extractives, e.g., to reduce the amount of triglycerides, free fatty acids, sterols, sterol esters and/or resin acids in a pulp, groundwood, wood chips, wood or paper waste product, any wood or cellulose-based product (which includes, e.g., fiberboards, cardboards, pressed wood or pressed board, and the like), or in any wood processing, paper-making or paper-recycling process.

[0668] In one aspect, free and esterified sitosterol, the main lipophilic constituents of eucalypt wood extractives, which have been associated with the formation of pitch deposits during manufacturing of environmentally-sound paper pulp from, e.g., Eucalyptus globulus wood, is removed or reduced using the enzymes and methods of the invention. In additional aspects, other lipophilic compounds, such as steroid hydrocarbons, squalene, steroid ketones (which can be formed during oxidative degradation of steroids) and triglycerides are removed or reduced (e.g., in pulp, groundwood, etc.) using the enzymes and methods of the invention, as described, e.g., by Martinez-Inigo (2001) J. Biotechnol. 84(2):119-126.

[0669] Thus, the enzymes of the invention and the methods of the invention address problems associated with the presence of triglycerides, free fatty acids, sterols, sterol esters and/or resin acids in any situation, and can be used in any method or machine process comprising the presence of triglycerides, free fatty acids, sterols, sterol esters and/or resin acids. In alternative aspect, enzymes of the invention and the methods of the invention are used in industrial, food or feed or experimental processes associated with the presence of triglycerides, free fatty acids, sterols, sterol esters and/or resin acids, and are not limited to applications related to pulp, wood processing or paper-making processes. For example, the enzymes of the invention are effective for reducing the amount, or changing the structure of triglycerides, free fatty acids, sterols, sterol esters and resin acids in any food or feed processing method (e.g., as described herein), any pharmaceutical processing method, any experimental method, and the like.

[0670] However, enzymes of the invention and the methods of the invention are particularly effective for use in chemical pulping or chemical wood processing or paper-making processes (in contrast to mechanical pulping) because esters (e.g., triglycerides, free fatty acids, sterols, sterol esters and resin acids) are hydrolyzed by the high pH and elevated temperatures used in mechanical pulping processes.

[0671] In one aspect, the invention provides compositions and methods for reducing levels of lipophilic wood extractives in the form of organisms (host cells), e.g., bacteria, fungi, yeast, viruses, that generate recombinant enzymes of the invention, thereby exposing the wood extractives to enzymes of the invention. For example, the invention provides compositions (e.g., host cells) and methods reducing levels of lipophilic wood extractives in wood and wood products, such as wood chips, or paper or paper pulp. In one aspect, the compositions and methods of the invention reduce levels of lipophilic wood extractives by pretreating wood chips with microorganisms, such as fungi, that express (and in one aspect, secrete) enzymes of the invention to degrade (hydrolyze) these compounds (e.g., triglycerides, free fatty acids, sterols, sterol esters and resin acids). In some aspects, the methods of the invention work better than traditional fungal pretreatments, because the latter are difficult to control. Thus, recombinant enzymes of the invention, including enzymes made (and in one aspect secreted) by host cells comprising nucleic acids encoding enzymes of the invention, are used in the enzymatic hydrolysis of triglycerides, sterol esters and/or resin acids to reduce pitch problems and increase paper strength. In one aspect, an enzyme of the invention can hydrolyze both triglycerides and sterol esters. Enzymes and host cells of the invention can be used in conjunction with other enzymes, e.g., Novozymes (Denmark) lipase RESINASE™ for pitch control. In this aspect, enzymes of the invention are used to supplement known enzymes, e.g., the lipase RESINASE™, by their ability to hydrolyze both wood triglycerides and steryl esters. In one aspect, enzymes of the invention can operate at elevated temperatures (e.g., up to about 50° C., 60° C., 70° C., 75° C., 80° C., 85° C., 90° C., 95° C. or more) and pH (from about pH 6 to pH 10 or more alkaline) and have activity on triglycerides, steryl esters or both triglycerides and steryl esters.

[0672] Waste Treatment

[0673] The hydrolases of the invention can be used in a variety of other industrial applications, e.g., in waste treatment. For example, in one aspect, the invention provides a solid waste digestion process using hydrolases of the invention. The methods can comprise reducing the mass and volume of substantially untreated solid waste. Solid waste can be treated with an enzymatic digestive process in the presence of an enzymatic solution (including hydrolases of the invention) at a controlled temperature. This results in a reaction without appreciable bacterial fermentation from added microorganisms. The solid waste is converted into a liquefied waste and any residual solid waste. The resulting liquefied waste can be separated from said any residual solidified waste. See e.g., U.S. Pat. No. 5,709,796.

[0674] In addition, the hydrolases (e.g., proteases) of the invention can be used in the animal rendering industry, to e.g., get rid of feathers, e.g., as described by Yamamura (2002) Biochem. Biophys. Res. Corn. 294:1138-1143. Alkaline proteases of the invention can also be used in the production of proteinaceous fodder from waste feathers or keratin-containing materials, e.g., as described by Gupta (2002) Appl. Microbiol. Biotechnol. 59:15-32.

[0675] Lubricants and Hydraulic Oils

[0676] The methods and compositions (enzymes of the invention, e.g., hydrolases, such as esterases, acylases, lipases, phospholipases or hydrolases of the invention) of the invention can be used to prepare lubricants, such as hydraulic oils. Thus, the invention also provides lubricants and hydraulic oils comprising a hydrolase of the invention. The purpose of a lubricant of the invention is to minimize friction and wear of metals. Lubricants can further comprise base fluids and additives improving the lubricative properties. See, e.g., U.S. Pat. No. 5,747,434.

[0677] Interesterification

[0678] In one aspect, the methods and compositions of the present invention can be used to modify the properties of triglyceride mixtures, and, in one aspect, their consistency. In one aspect, an enzyme of the invention can be used in the presence of a catalyst such as sodium metal or sodium methoxide to promote acyl migration between glyceride molecules such that the products consist of glyceride mixtures in which the fatty acyl residues are randomly distributed among the glyceride molecules.

[0679] In one aspect, the enzymes of the invention can be used to produce interesterification products in the reaction where hydrolysis of fat is minimized so that lipase-catalyzed interesterification becomes the dominant reaction. These conditions may include, for example, restricting the amount of water in the system.

[0680] In one aspect, enzymes of the invention can be used to catalyze interesterification reaction using mixtures of triglycerides and free fatty acids, as described, e.g., in EP 0 093 602 B2. In these cases, free fatty acid can be exchanged with the acyl groups of the triglycerides to produce new triglycerides enriched in the added fatty acid. In one aspect, 1,3-specific lipases of the invention can be used to confine the reaction to the 1- and 3-positions of the glycerides, which allow to obtain a mixture of triglycerides unobtainable by chemical interesterification or reaction with a non-specific lipase. In one aspect, non-specific lipases are used to attain results similar to chemical interesterification.

[0681] The ability to produce novel triglyceride mixtures using positionally specific lipases of the invention is useful to the oils and fats industry because some of these mixtures have valuable properties. For example, 1,3-specific lipase-catalyzed interesterification of 1,3-dipalmitoyl-2-monoleine (POP), which is the major triglyceride of the mid-fraction of palm oil, with either stearic acid or tristearin gives products enriched in the valuable 1-palmitoyl-3-stearoyl-2-monoleine (POSt) and 1,3-distearoyl-2-monoleine (StOSt). POSt and StOSt are the important components of cocoa butter. Thus, one aspect of the invention provides an interesterification reaction to produce cocoa butter equivalents from cheap starting materials.

[0682] In one aspect, the invention provides a method of production of a hard fat replacer using the 1,3-specific lipases of the invention. In one aspect, a hard fat replacer comprises a mixture of palm mid-fraction and StOSt, POSt or StOSt/POSt of at least 85% purity.

[0683] Oral Care Products

[0684] The invention provides oral care product comprising hydrolases of the invention. Exemplary oral care products include toothpastes, dental creams, gels or tooth powders, odontics, mouth washes, pre- or post brushing rinse formulations, chewing gums, lozenges, or candy. See, e.g., U.S. Pat. No. 6,264,925.

[0685] Brewing and Fermenting

[0686] The invention provides methods of brewing (e.g., fermenting) beer comprising hydrolases of the invention. In one exemplary process, starch-containing raw materials are disintegrated and processed to form a malt. A hydrolase of the invention is used at any point in the fermentation process. For example, hydrolases (e.g., proteases) of the invention can be used in the processing of barley malt. The major raw material of beer brewing is barley malt. This can be a three stage process. First, the barley grain can be steeped to increase water content, e.g., to around about 40%. Second, the grain can be germinated by incubation at 15 to 25° C. for 3 to 6 days when enzyme synthesis is stimulated under the control of gibberellins. In one aspect, hydrolases of the invention are added at this (or any other) stage of the process. The action of hydrolases results in an increase in fermentable reducing sugars. This can be expressed as the diastatic power, DP, which can rise from around 80 to 190 in 5 days at 12° C. Hydrolases (e.g., proteases) of the invention can be used in any beer or alcoholic beverage producing process, as described, e.g., in U.S. Pat. Nos. 5,762,991; 5,536,650; 5,405,624; 5,021,246; 4,788,066.

[0687] Medical and Research Applications

[0688] Hydrolases, (e.g., proteases) of the invention can be used for cell isolation from tissue for cellular therapies in the same manner that collagenases. For example, metallo-endoproteinases and other enzymes of the invention that can cleave collagen into smaller peptide fragments, can be used as “liberase enzymes” for tissue dissociation and to improve the health of isolated cells. “Liberase enzymes” can replace traditional collagenase. Proteases of the invention having collagenase I, collagenase II, clostripain and/or neutral protease activity can be used for tissue dissociation. In one aspect, for tissue dissociation, collagenase isoforms of the invention are blended with each other, and, optionally, with a neutral protease. In one aspect, the neutral protease is a neutral protease dispase and/or the neutral protease thermolysin.

[0689] Additionally, proteases of the invention can be used as antimicrobial agents, due to their bacteriolytic properties, as described, e.g., in Li, S. et. al. Bacteriolytic Activity and Specificity of Achromobacter b-Lytic Protease, J. Biochem. 124, 332-339 (1998).

[0690] Proteases of the invention can also be used therapeutically to cleave and destroy specific proteins. Potential targets include toxin proteins, such as Anthrax, Clostridium botulinum, Ricin, and essential viral or cancer cell proteins.

[0691] Proteases of the invention can also be used in disinfectants, as described, e.g., in J. Gen Microbiol (1991) 137(5): 1145-1153; Science (2001) 249:2170-2172.

[0692] Additional medical uses of the proteases of the invention include lipoma removal, wound debraidment and scar prevention (collagenases), debriding chronic dermal ulcers and severely burned areas.

[0693] Enzymes of the invention (e.g., esterases, proteases, etc., of the invention) can be used to in sterile enzymatic debriding compositions, e.g., ointments, in one aspect, containing about 250 collagenase units per gram. White petrolatum USP can be a carrier. In one aspect, enzymes (e.g., proteases) of the invention can be used in indications similar to Santyl® Ointment (BTC, Lynbrook, N.Y.). Proteases of the invention can also be used in alginate dressings, antimicrobial barrier dressings, burn dressings, compression bandages, diagnostic tools, gel dressings, hydro-selective dressings, hydrocellular (foam) dressings, hydrocolloid Dressings, I.V dressings, incise drapes, low adherent dressings, odor absorbing dressings, paste bandages, post operative dressings, scar management, skin care, transparent film dressings and/or wound closure. Proteases of the invention can be used in wound cleansing, wound bed preparation, to treat pressure ulcers, leg ulcers, burns, diabetic foot ulcers, scars, IV fixation, surgical wounds and minor wounds.

[0694] Additionally, enzymes of the invention can be used in proteomics and lab work in general. For instance, proteases can be used in the same manner as DNA restriction enzymes.

[0695] Other Industrial Applications

[0696] The invention also includes a method of increasing the flow of production fluids from a subterranean formation by removing a viscous, protein-containing, damaging fluid formed during production operations and found within the subterranean formation which surrounds a completed well bore comprising allowing production fluids to flow from the well bore; reducing the flow of production fluids from the formation below expected flow rates; formulating an enzyme treatment (comprising an enzyme of the invention) by blending together an aqueous fluid and a polypeptide of the invention; pumping the enzyme treatment to a desired location within the well bore; allowing the enzyme treatment to degrade the viscous, protein-containing, damaging fluid, whereby the fluid can be removed from the subterranean formation to the well surface; and wherein the enzyme treatment is effective to attack protein in cell walls.

[0697] Hydrolases of the invention can be used for peptide synthesis, in the leather industry, e.g., for hide processing, e.g., in hair removal and/or bating, for waste management, e.g., removal of hair from drains, in the photography industry, e.g., for silver recovery from film, in the medical industry, e.g., as discussed above, e.g., for treatment of burns, wounds, carbuncles, furuncles and deep abscesses or to dissolve blood clots by dissolving fibrin, for silk degumming.

[0698] In other aspects, enzymes of the invention can be used as flavor enhancers in, for example, cheese and pet food, as described, e.g., in Pommer, K., Investigating the impact of enzymes on pet food palatability, Petfood Industry, May 2002, 10-11.

[0699] In yet another embodiment of the invention, enzymes of the invention can be used to increase starch yield from corn wet milling, as described, e.g., in Johnston, D. B., and Singh, V. Use of proteases to Reduce Steep Time and SO₂ requirements in a corn wet-milling process, Cereal Chem. 78(4):405-411.

[0700] In other aspects, enzymes of the invention can be used in biodefense (e.g., destruction of spores or bacteria). Use of enzymes in biodefense applications offer a significant benefit, in that they can be very rapidly developed against any currently unknown biological warfare agents of the future. In addition, proteases of the invention can be used for decontamination of affected environments.

[0701] Additionally, enzymes of the invention can be used in biofilm degradation, in biomass conversion to ethanol, and/or in the personal care and cosmetics industry.

[0702] Enzymes of the invention can also be used to enhance enantioselectivity, as described, e.g., in Arisawa, A. et. al. Streptomyces Serine Protease (DHP-A) as a New Biocatalyst Capable of Forming Chiral Intermediates of 1,4-Diohydropyridine Calcium Antagonists. Appl Environ Mircrobiol 2002 June; 68(6):2716-2725; Haring, D. et. al. Semisynthetic Enzymes in Asymmetric Synthesis:Enantioselective Reduction of Racemic Hydroperoxides Catalyzed by Seleno-Subtilisin. J. Org. Chem. 1999, 64:832-835.

### EXAMPLES

### Example 1

### Exemplary Lipase Assays

[0703] The following example describes exemplary assays to screen for lipase activity. In one aspect, these exemplary assays can be used as routine screens to determine if a polypeptide is within the scope of the invention. Such assays include use of pH indicator compounds to detect cleavage of fatty acids from triglycerides, spectrophotometric methods, HPLC, GC, MS, TLC and others. Jaeger (1994) FEMS Microbiol. Rev. 15:29-63; Ader (1997) Methods Enzymol. 286:351-386; Vorderwtilbecke (1992) Enzyme Microb. Technol. 14:631-639; Renard (1987) Lipids 22: 539-541.

[0704] In one aspect, the methods of the invention screen for regio-selective lipases, e.g., Sn-1, Sn-3 and/or Sn-3 regio-selective lipases. In one aspect, the substrates 1,3-diamide and 1,3-diether TAG analogues are used to target, or select for, Sn-2 selective lipases. In one aspect, the methods of the invention screen for lipases that exhibit regioselectivity for the 2-position of lipids, e.g., TAGs. Structured synthesis of lipids using Sn-2 selective lipases can be useful for the synthesis of a variety of TAGs, including 1,3-diacylglycerides (1,3-DAGs) and components of cocoa butter.

[0705] In one aspect, regio-selective lipases, including Sn-2 selective lipases, are characterized for regioselectivity using rigorous analytical methods. This can eliminate false results due to acyl migration. In one aspect, lipases are tested for Sn2 specificity using analytical methods such as NMR spectroscopy. Also, a structured triacylglyceride of the ABA-type (where A and B denote fatty acids distributed along the glycerol backbone) can be subjected to hydrolysis or alcoholysis using lipases (e.g. of the invention) followed by analysis of the partial glycerides and fatty acid (esters) formed. Alcoholysis conditions at controlled water activity, e.g. using primary alcohols such as methanol or ethanol are preferred as undesired acyl migration can be avoided need different references. Sn-2 selectivity of lipases was reported, however, the extent of sn-2 selectivity was very low (Briand (1995) Eur. J. Biochem. 228: 169-175; Rogalska (1993) Chirality 5, 24-30.

[0706] In one aspect, regio-selective lipases are assayed for their regio-specificity (Sn2 versus Sn1/Sn3 versus Sn1,3) on appropriate lipids, such as tripalmitin, tristearin, triolein, tricaprylin, and trilaurin, and also for their fatty acid specificity.

[0707] Screening for Lipase/Esterase Activity

[0708] Colonies are picked with sterile toothpicks and used to singly inoculate each of the wells of 96-well microtiter plates. The wells contained 250 μL of LB media with 100 μg/mL ampicillin, 80 μg/mL methicillin, and 10% v/v glycerol (LB Amp/Meth, glycerol). The cells were grown overnight at 37° C. without shaking. This constituted generation of the “Source GenBank.” Each well of the Source GenBank thus contained a stock culture of E. coli cells, each of which contained a pBluescript with a unique DNA insert.

[0709] Plates of the source GenBank were used to multiply inoculate a single plate (the “condensed plate”) containing in each well 200 μL of LB Amp/Meth, glycerol.

[0710] This step was performed using the High Density Replicating Tool (HDRT) of the Beckman Biomek with a 1% bleach, water, isopropanol, air-dry sterilization cycle in between each inoculation. Each well of the condensed plate thus contained 10 to 12 different pBluescript clones from each of the source library plates. The condensed plate was grown for 16 hours at 37° C. and then used to inoculate two white 96-well Polyfiltronics microtiter daughter plates containing in each well 250 pdt of LB Amp/Meth (no glycerol). The original condensed plate was put in storage −80° C. The two condensed daughter plates were incubated at 37° C. for 18 hours.

[0711] The short chain esterase ‘600 μM substrate stock solution’ was prepared as follows: 25 mg of each of the following compounds was dissolved in the appropriate volume of DMSO to yield a 25.2 mM solution. The compounds used were 4-methylumbelliferyl propriono ate, 4-methylumbelliferyl butyrate, and 4-methylumbelliferyl heptanoate. Two hundred fifty microliters of each DMSO solution was added to ca 9 mL of 50 mM, pH 7.5 HEPES buffer which contained 0.6% of Triton X-100 and 0.6 mg per mL of dodecyl maltoside (Anatrace, Maumee, Ohio). The volume was taken to 10.5 mL with the above HEPES buffer to yield a slightly cloudy suspension.

[0712] The long chain ‘600 μM substrate stock solution’ was prepared as follows: 25 mg of each of the following compounds was dissolved in DMSO to 25.2 mM as above. The compounds used were 4-methylumbelliferyl elaidate, 4-methylumbelliferyl palmitate, 4-methylumbelliferyl oleate, and 4-methylumbelliferyl stearate. All required brief warming in a 70° C. bath to achieve dissolution. Two hundred fifty microliters of each DMSO solution was added to the HEPES buffer and diluted to 10.5 mL as above. All seven umbelliferones were obtained from Sigma Chemical Co. (St. Louis, Mo.).

[0713] Fifty μL of the long chain esterase or short chain esterase ‘600 μM substrate stock solution’ was added to each of the wells of a white condensed plate using the Biomek to yield a final concentration of substrate of about 100 μM. The fluorescence values were recorded (excitation=326 nm, emission=450 nm) on a plate-reading fluorometer immediately after addition of the substrate. The plate was incubated at 70° C. for 60 minutes in the case of the long chain substrates, and 30 minutes at RT in the case of the short chain substrates. The fluorescence values were recorded again. The initial and final fluorescence values were compared to determine if an active clone was present.

[0714] To isolate the individual clone which carried the activity, the Source GenBank plates were thawed and the individual wells used to singly inoculate a new plate containing LB Amp/Meth. As above, the plate was incubated at 37° C. to grow the cells, 50 μL of 600 μM substrate stock solution was added using the Biomek and the fluorescence was determined. Once the active well from the source plate was identified, cells from this active well were streaked on agar with LB/Amp/Meth and grown overnight at 37° C. to obtain single colonies. Eight single colonies were picked with a sterile toothpick and used to singly inoculate the wells of a 96-well microtiter plate. The wells contained 250 μL of LB Amp/Meth. The cells were grown overnight at 37° C. without shaking. A 200 μL aliquot was removed from each well and assayed with the appropriate long or short chain substrates as above. The most active clone was identified and the remaining 50 μL of culture was used to streak an agar plate with LB/Amp/Meth. Eight single colonies were picked, grown and assayed as above. The most active clone was used to inoculate 3 mL cultures of LB/Amp/Meth, which were grown overnight. The plasmid DNA was isolated from the cultures and utilized for sequencing.

### Example 2

### Exemplary Structured Lipid Synthesis Methods

[0715] The following example describes exemplary structured lipid synthesis methods of the invention using lipases of the invention.

[0716] In one aspect, the invention provides a “Forced Migration Methodology” for the structured synthesis of lipids using the lipases of the invention. This method provides for the efficient synthesis of a variety of structured lipids, including 1,3-DAGs and components of cocoa butter, as illustrated in FIG. 7. In one aspect, the method for producing structured lipids, in this example a structured triacylglyceride (sTAG), comprises three major steps:
[0717] 1. Regiospecific hydrolysis or alcoholysis (e.g. ethanolysis) of a TAG using a Sn1-specific or Sn3-specific lipases to yield a 2, 3 or 1,2-DAG, respectively;
[0718] 2. Promotion of acyl migration in a purified or unpurified DAG under kinetically-controlled conditions using ion-exchange resins or other method(s), resulting in the structured 1,3-DAG; and
[0719] 3. Fatty acid-specific lipase catalyzed addition of a fatty acid or a fatty acid derivative, such as a fatty acid ethyl ester or vinyl ester, at the Sn2 position, yielding the sTAG.

[0720] This route can provide access to two target groups of lipids, 1,3-DAGs and sTAGs with the same set of enzymes and methodology. The method can use lipases that have Sn1 and/or Sn3 regiospecificity; such enzymes are commercially available (Rhizopus delemar (Amano, Japan) and Rhizomucor miehei (Novozymes, Denmark

[0721] In one aspect, Rhizopus sp. lipases and Rhizomucor miehei lipases are used. These lipases are known to exhibit higher specificity for hydrolysis of fatty acids in the Sn1 position compared with the Sn3 position. In one aspect, the methods further comprise use of these Rhizopus and Rhizomucor miehei lipases to confirm Step 1, of FIG. 7, i.e., the regiospecific hydrolysis or alcoholysis (e.g. ethanolysis) of a TAG using an Sn1-specific or Sn3-specific lipase to yield a 2, 3 or 1,2-DAG, respectively.

[0722] In one aspect, the invention provides a forced migration method supplemented with glycerol. Addition of glycerol to the enzyme reaction prior to the treatment with anion exchange resin (or other migration catalysts) can be a way to increase yields of 1,3 DAGs in forced migration reactions, as illustrated in FIG. 27.

[0723] In one aspect, the methods further comprise confirmation of Step 2, FIG. 7, by treatment of purified or unpurified 1,2-DAG or 2,3-DAG with an ion-exchange resin, for example, an ion-exchange column, under a variety of conditions. Major variables include the nature of the ion-exchange resin, pH, flow rates, buffer type and ionic strengths. Alternative methods of promoting acyl migration can be used. In one aspect, the acyl migration can be performed under non-equilibrium conditions, e.g., such that the end product contains greater ratios of one product over another, for example, such that the end product contains a 2:1 ratio of 1,3-DAG to 2,3-DAG. Substrates for the Step 2 validation studies are available commercially.

[0724] In one aspect, acyl migration in 2,3-DAGs (or 1,2-DAGs) is promoted under kinetic conditions such that the final product is a purified 1,3-DAG in greater than about a 70% yield.

[0725] In one aspect, Step 3, FIG. 7, uses a lipase that is fatty acid specific, but there are no regiospecific requirements given a pure 1,3-DAG as substrate. The lipase from Geotrichium candidum exhibits a very high specificity for fatty acids that have A9 unsaturation. This enzyme is readily available and can be utilized to confirm Step 3.

### Example 3

### Exemplary Structured Synthesis of Cocoa Butter Alternatives (CBAs)

[0726] The following example describes exemplary structured lipid synthesis methods of the invention using the lipases of the invention. This example describes the structured synthesis of triacylglycerides (sTAGs) as cocoa butter alternatives (CBAs).

[0727] Natural cocoa butter consists mostly of three TAG: 1,3-dipalmitoyl-2-oleoylglycerol (POP), 1,3-distearoyl-2-oleoylglycerol (SOS) and 1-palmitoyl-2-oleoyl-3-stearoylglycerol (POS). The relative proportions of these three TAGs differ somewhat depending upon the source of cocoa butter, but are approximately 21:31:48 (POP:SOS:POS). The methods of the invention provide for the structured synthesis of a cocoa butter alternatives having any proportion of POP:SOS:POS, including the natural 21:31:48 POP:SOS:POS. The methods of the invention provide for the structured synthesis related TAGs, e.g., 1-oleoyl-2,3-dimyristoylglycerol (OMM). The methods of the invention also provide for the selective processing of natural cocoa butter using the lipases of the invention.

[0728] In one aspect, both the Sn2 lipase and the methods outlined above (including Example 2) are used in the synthesis of key structured lipids of CBAs. Lipases can be assayed for their regiospecificity (Sn2 versus Sn1/Sn3 versus Sn1,3) on appropriate lipids, such as tripalmitin, tristearin, triolein, tricaprolein, and trilaurein. Lipases also can be assayed for their fatty acid specificity.

### Example 4

### Exemplary Structured Synthesis of Nutraceuticals

[0729] The following example describes exemplary structured lipid synthesis methods of the invention for making nutraceuticals using the lipases of the invention.

[0730] In one aspect, 1,3-DAGs are synthesized for use in nutraceuticals. 1,3-DAGs are the products of the first step of the Sn2 lipase synthesis of sTAGs shown in FIG. 6 and first two steps of the synthesis of structured lipids as shown in FIG. 7 and FIG. 8. Routine assaying of lipases for Sn2 versus Sn1 or Sn3 specificity can provide the data to determine the optimum lipases and methodology for different 1,3-DAG and nutraceutical synthesis applications.

[0731] In one aspect, poly-unsaturated fatty acids (PUFAs) are made using the methods and lipases of the invention, e.g., using a protocol as set forth in FIG. 9, bottom. PUFAs are themselves valuable commodities and can be extracted from PUFA-containing fat sources, such as fish oil, using PUFA-specific lipases of the invention. In one aspect, the invention uses enzymes that can distinguish between esters of different PUFAs, e.g. docosahexaenoic acid (DHA) versus eicosapentaenoic acid (EPA), facilitating the development of highly purified products (S. Wongsakul et al., Eur. J. Lipid Sci. Technol. 105 (2003) 68-73). Lipases can be tested for their specificities on a variety of PUFA esters and glycerol esters.

### Example 5

### Exemplary Structured Synthesis of Lipids Containing Poly-Unsaturated Fatty Acids

[0732] The following example describes exemplary structured lipid synthesis methods of the invention for making lipids containing poly-unsaturated fatty acids (PUFAs) using the lipases of the invention. These PUFA-containing lipids can be used in foods, feeds, cosmetics, pharmaceuticals and drug delivery agents, nutraceuticals and the like.

[0733] In one aspect, fish oil is a starting material, since in fish oil the majority of fatty acids at the 2 position are PUFAs. In one aspect, the methods comprise a 1,3-lipase-catalyzed interesterification of fish oil with medium-chain fatty acid esters to form MLM-type lipids (triacylglycerols (TAG) can be of types MML, MLM, MLL, and LML (M, medium-chain fatty acid; L, long-chain fatty acid, see, e.g., Kurvinen (2001) Lipids 36:1377-1382)).

[0734] In one aspect, the invention provides methods for making PUFA-containing sTAGs, as illustrated at the top of FIG. 9 (FIG. 9A), and 2-PUFA sMAGs and purified PUFAs, as illustrated at the bottom of FIG. 9 (FIG. 9B). Any appropriate starting oil can be used. In one aspect, if it is more economic to use fish-oil fatty acids instead of purified PUFAs, lipases with specificity for fatty acid B (in FIG. 9A, top) and PUFAs can be used. Lipases can be screened for fatty acid specificity on simple esters and glycerol esters. In one aspect, 2-PUFA MAGs are synthesized from fish oil using either a Sn1,3-lipase (see FIG. 9B) or a non-regiospecific lipase that does not cleave PUFA esters.

### Example 6

### Exemplary Growth-Kill Assay

[0735] The following example describes an exemplary Growth-Kill assay for testing the activity of the lipases of the invention. See, e.g., Chem. Communication (2002) 1428-1429.

[0736] The Growth-Kill assay provides a method for in vivo selection of enzymes, e.g. lipases, or mutants thereof, with desirable properties. The assay combines two components, a growth component and a kill component. The first of these is a substrate from which the enzyme, e.g. lipase, liberates an element which allows the host organisms to grow, e.g. a carbon source. The second of these is a substrate from which the enzyme, e.g. lipase, liberates an element which prevents the host organism from growing or kills the host organism, e.g. an antibiotic.

[0737] The invention provides methods of modifying a nucleic acid encoding a lipase to generate an enzyme with modified properties. A Growth-Kill assay can be used to discriminate between two fatty acids, to determine if a lipase has altered enzyme specificity, to determine if a lipase is within the scope of the invention, and the like. An exemplary Growth-Kill assay is outlined in FIG. 11, where R1 is a growth substrate for the screening host and R2 is a substance that is toxic to the cell and kills the host if released from the ester. In one aspect, growth substrates (1-acyl glycerol esters) and kill substrates (3-acyl chloramphenicol esters) are used

### Example 7

### Protocol for the Synthesis of 1,3-diglyceride

[0738] The following example describes an exemplary protocol used to practice the compositions (the lipases) and the methods of the invention. These exemplary protocols can also be used to determine if a lipase is within the scope of the invention. In one aspect, an exemplary protocol for the synthesis of 1,3-diglyceride (1,3-DG) and structured lipids using lipases of the invention is described.

[0739] In one aspect, glycerol and free fatty acid (FFA) or fatty acid vinyl ester (FAVE) are esterified immobilized glycerol (see, e.g., J. Am. Oil Chem. Soc., 1992, 69:955-960). The immobilized glycerol can be on a silica gel. In one exemplary assay, Lipozyme RM IM™ (an immobilized 1,3-specific lipase, Novozymes, Denmark), with MTBE, at room temperature was used. This has the advantage of high yield and purity of 1,3-DG, and fast reaction. However, MTBE is not allowed in food use and there is difficulty in separation of immobilized enzyme and silica gel In one aspect, the esterification is done using non-immobilized glycerol. In one exemplary assay, esterification of glycerol and fatty acid (FFA) or fatty acid vinyl ester (FAVE) is in a solvent-free/organic solvent with an immobilized lipase from Candida antarctica type B (CAL-B), a lipase from Rhizopus delemar immobilized on EP100 (D-EP100), and Lipozyme RM IM™ (Novozymes, Denmark), at 0° C. or room temperature (RT). One advantage of this exemplary protocol is the solvent-free condition; it allows ease of separation of immobilized enzyme and with a further purification step, a moderate-high yield.

[0740] In one aspect, alcoholysis and hydrolysis of triglycerides (TG) is accomplished using 1,3-regiospecific lipases, D-EP 100 and Lipozyme RM IM™ (Novozymes, Denmark), organic solvents, preferentially at controlled water activity. In this reaction, the substrates (natural oil) are cheap and the reaction provides an acceptable yield. Most DAG formed is 1,2(2,3)-DAG.

[0741] In one aspect, an exemplary reaction involved induction of acyl migration of 1,2(2,3)-DAG. Most DAG obtained from alcoholysis and hydrolysis of TAG is 1,2 (2,3)-DAG. It is thus necessary to induce the acyl migration of 1,2(2,3)-DAG to 1,3-DAG. Several factors were studied, including ion-exchangers, acid or base, heat, carrier, water activity. One exemplary reaction involved the esterification between 1,3-DAG and FFA or FAVE using an sn2-specific enzyme or a non-regiospecific lipase but specific to fatty acid change length or specific fatty acid.

[0742] Esterification Using Immobilized Glycerol)

[0743] 1,3-DAG was synthesized from glycerol, 1 mmol, immobilized on 4 g silica gel) and vinyl laurate (2 mmol) in 8 ml methyl-tert-butyl ether (MTBE) at room temperature using Lipozyme RM IM™ (Novozymes, Denmark) (10% based on glycerol weight) as catalyst (Matthias et al. 1992???). The reaction was carried out in a 10-ml vial and the reaction mixture was mixed by magnetic stirrer (500 rpm). After 24 hours (h), enzyme was separated from the reaction mixture by filtration to stop the reaction. The filtrate was evaporated under vacuum. 1,3-DAG in oily residue was recovered and purified by crystallization in dry methanol at 4° C. followed by filtration. See, e.g., J. Am. Oil Chem. Soc., 1992, 69:955-960).

[0744] Esterification Using Non-Immobilized Glycerol 1,3-DAG was synthesized by esterification of glycerol (1 mmol) and FFA or FAVE (2 mmol) in a solvent-free condition or in organic solvent at 0° C. using CAL-B (10% based on glycerol weight) as catalyst. The reaction was carried out in a 4-ml vial and the reaction mixture was mixed by magnetic stirrer (400 rpm). Activiated molecular sieve was added in a reaction with FFA to remove produced water from the reaction mixture. In some reactions organic solvent (2 ml) was added to the reaction mixture to dissolve a solid FFA. The reaction was stopped by dissolving the reaction mixture in n-hexane (in case of a solvent-free reaction condition) and centrifuged to separate immobilized enzyme from the reaction mixture. The 1,3-DAG was recovered and purified by crystallization at −20° C. If high contents of MAG were present, a recrystallization in dry methanol at −20° C. afforded pure 1,3-DAG. Samples (10A1) were periodically withdrawn during the reaction to determine the acylglycerol composition. Samples were pretreated before analysis by adding 0.3 ml Folsh's solution (chloroform:methanol, 2:1 by vol) and 0.3 ml distilled water, mixed for 30 sec, followed by centrifuging (10000 rpm, 2 min). Organic layer was used for analysis by IATROSCAN™ (Shell-usa, Fredericksburg Va.).

[0745] Alcoholysis and Hydrolysis of TAG

[0746] TAG (3 mmol) was dissolved in organic solvent (2 ml) and pre-equilibrated over a saturated-salt solution at a_{W} 0.11 for 48 h (only for alcoholysis reaction). Dry ethanol or water (3 mmol) was added and the reaction mixture was incubated at 40° C. for 15 min. Immobilized lipase (10% based on TAG weight) was added to start the reaction. The reaction was carried out in a 4-ml screw-capped vial and the reaction mixture was mixed by magnetic stirrer (400 rpm). An aliquot of the reaction mixture was periodically withdrawn and diluted with chloroform to appropriate dilution, followed by analysis with IATROSCAN™ (Shell-usa, Fredericksburg Va.) to determine acylglycerol composition. Immobilized lipase was separated from the reaction mixture after 48 h by centrifugation to stop the reaction.

[0747] Induction of Acyl Migration

[0748] Effect of temperature, FFA (oleic acid), carrier (celite) and ion-exchanger on acyl migration of 1,2-dipalmitin (1,2-DP, this also includes the stereoisomer 2,3-DP) were studied. 1,2-DP was dissolved in n-hexane (8 mg/ml). Oleic acid (2-4 mmol) or celite (8 mg) or ion-exchanger (10-100 mg) was added directly to the reaction mixture. All reactions were carried out in a 1.5-ml Eppendorf reaction vial with shaking (1400 rpm) at room temperature (25° C.), except when testing effect of temperature, then the reaction was carried out at 40 or 60° C.

[0749] Synthesis of Structured Triglycerides (ST) from 1,3-diglycerides (1,3-DAG) and Free Fatty Acid or Fatty Acid Vinyl Ester

[0750] Structured triglycerides (ST) was synthesized by esterification of 1,3-DAG and oleic acid (OA) or oleic acid vinyl ester (OAVE) in n-hexane at 60° C. using immobilized lipase from Pseudomonas sp. (Amano PS-D, Amano Enzyme USA, Elgin, Ill.) as biocatalyst. 0.1 mmol of 1,3-DG (45.7 mg of 1,3-dilaurin or 34.4 mg of 1,3-dicaprylin) and 0.2 mmol of OA (28.2 mg) or OAVE (60.2 mg) was dissolved in 1 ml n-hexane in a 2-ml screw-capped vial. Activated molecular sieve was added when OA was used as acyl donor. The reaction was started by addition of PS-D (10% weight of 1,3-DG). The vials were shaken at 1400 rpm at 60° C. An aliquot of reaction mixtures was withdrawn for analysis with IATROSCAN™ (Shell-usa, Fredericksburg Va.). ST thus obtained was purified on TLC plate and the TAG band was scrapped of and methylated followed by GC analysis.

[0751] Acylglycerol composition was determined by IATROSCAN™ (Shell-usa, Fredericksburg Va.) analysis (TLC-FID). Total fatty acid composition of ABA-ST was determined by GC analysis of corresponding methylesters. Purity of 1,3-DAG was confirmed by ¹H-NMR spectroscopy.

[0752] Determination of Fatty Acid Composition by GC Analysis

[0753] 10 mg of 1,3-DG was methylated with 0.5% NaOH in methanol (500 μl) and then incubated for 10 min at 60° C. The methylesters were extracted with n-hexane (400 μl) for 1 min. The n-hexane layer was washed with 200 μl distilled water and dried over anhydrous sodium sulfate. Analysis was carried out with a Hewlett-Packard 5890 (series II) gas chromatograph (GS) (Hewlett-Packard, USA) on a FFAP column (Permabond FFAP-DF-0.25, 25 m×0.25 mm i.d., Macherey-Nagel GmbH, Duren, Germany). Hydrogen was used as the carrier gas. The temperature program used was 150° C. (4° C./min, 0.50 min), 170° C. (5° C./min), 195° C. (I ° C./min) and 215° C. (9.50 min). Injector and detector temperatures were 250° C. Response factors were determined using a standard mixture of fatty acid methylesters

[0754] Determination of Glyceride Composition by TLC/FID Analysis Changes in glyceride composition during reaction were quantitatively determined using Iatroscan analytical method. Before analysis, a blank of the chromarod was scanned. After treating chlomarod with boric acid (3%) and drying for 5 min, 1 μl of the reaction medium (diluted in chloroform at appropriate dilution) is spotted onto the chromarod and the spotted sample was developed for 10 cm in a mixture of benzene:chloroform:acetic acid (50:30:0.5, by vol). After drying, the chromarod in an oven at 110° C. for 5 min, scanning is performed at a hydrogen flow rate of 160 ml/min and an air flow rate of 2.01/min to produce a chromatogram.

[0755] Hplc Separation of Triacylglycerols

[0756] The composition of the triacylglycerols formed during the enzymatic esterification was characterized by HPLC using a nucleosil C18 column, (5 μm, 250×4 mm, Sykam, Gilching, Germany) and an evaporative light scattering detector (ELSD) (Polymer labs) at a flow rate of 1.5 ml/min. The purpose of ELSD is to complement ultraviolet (UV) detection of solutes, and to detect solutes, which do not absorb UV light such as medium-chain triglycerides. The principle of ELSD applies to all solutes having a lower volatility than the mobile phase. Elution was performed using a gradient elution system of acetonitrile and dichloromethane (70% to 55% acetonitrile over 10 min, followed by 55% to 70% acetonitrile over 8 minute).

[0757] Regiospecific Analysis of Triglycerides

[0758] The regiospecific analysis of oil was conducted by Grignard degradation with allylmagnesium bromide followed by gas chromatograph (GS) analysis. 20 mg of TG was dissolved in dry diethyl ether (2 ml). 800 μl of allyl magnesium bromide solution (1M) was added, and the mixture was shaken for 30 second, then 300 μl glacial acetic acid was added, followed by 5 ml of 0.4-M boric acid to stop the reaction. A mixture of deacylated products was extracted with diethyl ether. This extract was washed with 5 ml solution of aqueous boric acid (0.4 M)/aqueous NaHCO₃ (2%), 50:50 (vol/vol). The ether layer was directly subjected to TLC plate, which was impregnated with boric acid, to isolate each fraction of deacylated products. The plate was developed with a chloroform/acetone/acetic acid solution (85:15:1, by vol) as developing system. The 1-MG bands were scraped off and methylated to determine their fatty acid composition using the same method described above. The molar percentage of fatty acid composition at sn 1(3)- and sn 2-positions of the produced TG were calculated. Equation for % FA in sn2-position is shown below:

[% FAₛₙ₂₋ₚₒₛᵢₜᵢₒₙ]=3[% FA_{TG}]−2[% FA_{1-MG}]

[0759] where [% FA_{1-MG}] and [% FA_{TG}] indicated for each fatty acid, its percentage found in 1-monoglyceride and in triglycerides, respectively.

[0760] Dicaprylin (1,3-DCy)

[0761] 1,3DCy was purified by crystallization from n-hexane at −20° C. several times. When high amount of MG was presented, the second crystallization in dry methanol has to be done to obtain 1,3-DCy in high purity (>98%). Highest yield of 1,3-DCy (93%) obtained from esterification between vinyl caprylate (CyVE) and glycerol at 0° C. in a solvent-free condition catalyzed by CAL-B. The yield thus obtained was higher than the yield obtained (75%) in literature (see, e.g., J. Am. Oil Chem. Soc., 1992, 69:955-960), see FIG. 12. FIG. 12 illustrates data of various esterification reactions in the synthesis of 1,3-DCy. Method 1 is the esterification of glycerol and caprylic acid in a solvent-free condition at 0° C. catalyzed by CAL-B. Method 2 is the esterification of glycerol and caprylic acid vinyl ester in a solvent-free condition at 0° C. catalyzed by CAL-B. Method 3 see, e.g., J. Am. Oil Chem. Soc., 1992, 69:955-960) is the esterification of glycerol immobilized on silica gel and caprylic acid vinyl ester in MTBE at room temperature catalyzed by Lipozyme RM IM™ (Novozymes, Denmark). DG=1,3-dicaprylin, MG 1-monocaprylin.

[0762] Esterification between caprylic acid (Cy) and glycerol gave moderate yield (55%) at lower reaction rates and high amount of MAG was produced during the reaction. The yield could be increased up to 65% by increasing the reaction temperature from 0° C. to room temperature. CAL-B gave higher yield and less MAG and allowed faster reaction rate than Lipozyme RM IM™ (Novozymes, Denmark) in esterification of glycerol and Cy or CyVE, both in organic solvent and a solvent-free condition.

[0763] Studies on effect of ratio of glycerol:caprylic acid on esterification reaction showed that initial reaction rate decreased and the yield of 1,3-DCy slightly increased with increasing ratio from 1:2 to 1:6, as illustrated in (FIG. 13). FIG. 13 summarizes data showing the effect of substrate ratio on esterification between glycerol and caprylic acid in n-hexane at 0° C. catalyzed by CAL-B (DG=1,3-dicaprylin, MG=1-monocaprylin).

[0764] 1,3-Dilaurin (1,3-DLa)

[0765] 1,3DLa was easily purified and recovered by crystallization in dry methanol at room temperature (RT) or in hexane at −20° C. (purity >98%). When lauric acid (La) was used as an acyl-donor, solvent was added to dissolve the FFA. Though the method as described in J. Am. Oil Chem. Soc., 1992, 69:955-960, allowed faster reaction rate with high yield of 1,3-DLa (65%), the highest yield (78%) of 1,3-DLa obtained from esterification between glycerol and lauric acid vinyl ester (LaVE) at 0° C. in a solvent-free condition catalyzed by CAL-B after 24 h, as illustrated in FIG. 14. FIG. 14 summarizes data of various synthesis of 1,3-dilaurin. Method 1=esterification of glycerol and lauric acid in n-hexane at 0° C. catalyzed by CAL-B; Method 2=esterification of glycerol and lauric acid vinyl ester in a solvent-free condition at 0° C. catalyzed by CAL-B; Method 3 (Schneider's method)=esterification of glycerol (immobilized on silica gel) and lauric acid vinyl ester in MTBE at room temperature catalyzed by Lipozyme RM IM™ (Eurzyme, Dublin, Ireland). (DG=1,3-dilaurin, MG=1-monolaurin). LaVE, as acyl donor, allowed higher yield and faster reaction with less amount of MG than La.

[0766] CAL-B gave highest yield and fastest reaction rate of esterification of LaVE and glycerol at 0° C., while Lipozyme RM IM™ gave moderate yield of 1,3-DLa with high amount of MG and Lipozyme TL™ showed very low activity in the same reaction condition. When increasing reaction temperature to 25° C., Lipozyme RM IM™ showed higher activity, while CAL-B was less active. In the esterification reaction between glycerol and lauric acid in n-hexane catalyzed by CAL-B, reaction rate and the yield of 1,3-DLa decreased with increasing amount of La, as shown in FIG. 15. FIG. 15 summarizes the effect of substrate ration o esterification of glycerol and lauric acid in n-hexane at room temperature catalyzed by CAL-B (DG=1,3-dilaurin, MG=1-monolaurin).

[0767] 1,3-Dipalmitin (1,3-DP) and 1,3-distearin (1,3-DS)

[0768] Reactions were carried out in organic solvent and at higher temperature (25° C. to 40° C.) due to a low solubility of palmitic acid (PA) and stearic acid (SA). The DG yield was lower than the yield of the reaction with La or Cy. Highest yield (80%) and fastest reaction rate was obtained from esterification of glycerol and palmitic acid vinyl ester (PAVE) in MTBE at 40° C. catalyzed by D-EPI 00. Reaction reached the equilibrium within 6-8 h with low amount of MG. Esterification of PA and immobilized glycerol gave higher yield and faster reaction than esterification with free glycerol, as shown in FIG. 16. FIG. 16 summarizes the synthesis of 1,3-dipalmitin. Method 1=esterification of glycerol and palmitic acid in MTBE at 40° C. catalyzed by D-EP100; Method 2=esterification of glycerol and palmitic acid vinyl ester in MTBE at 40° C. catalyzed by D-EP100; Method 3 (Schneider's method)=esterification of glycerol (immobilized on silica gel) and palmitic acid vinyl ester in MTBE at room temperature catalyzed by Lipozyme RM IM™. (DG=1,3-dipalmitin, MG=1-monopalmitin).

[0769] D-EP100 gave higher yield and activity than Lipozyme RM IM™ in all cases of 1,3-DP synthesis. Moreover, Lipozyme RM IM™ showed no activity in esterification of PA or PAVE when the reaction was performed in MTBE and low activity in n-hexane. D-EP100 preferred the esterification of PA than SA, while not much different activity on PA and SA was observed with Lipozyme RM IM™, as illustrated in FIG. 17. FIG. 17 summarizes data for the esterification of glycerol and palmitic (C16:O) or stearic (C18:0) acid in n-hexane at 40° C. (RM=Lipozyme RM IM™, DEP=D-EP 100, DG=1,3-diglycerides, MG=1-monoglycerides).

[0770] Alcoholysis of Triglycerides

[0771] Alcoholysis of pure triglycerides (TGs), including trilaurin, tripalmitin and tristearin, was carried out. Most diglyceride (DG) obtained from alcoholysis reaction were 1,2-DG. A high amount of unreacted TG remained in the reaction mixture. Acyl migration was observed during the reaction, especially in hydrolysis reaction, as illustrated in FIG. 18. FIG. 18 shows data from alcoholysis reaction showing the 1,3-DS/1,2-DS ratio during alcoholysis and hydrolysis of tristearin. DEP=D-EP100, RM Lipozyme RM 1M, Hx=n-hexane, HYD=hydrolysis, ALC=alcoholysis.

[0772] The reaction catalyzed by Lipozyme RM IM™, though gave lower yield, showed higher acyl migration than the reaction catalyzed by D-EP100. Low acyl migration was observed in alcoholysis using CAL-B after 6 h. This could be because 1,2-DG and 1,3-DG were produced at the same time according to the non-specificity of CAL-B.

[0773] D-EP100 showed higher activity than CAL-B and Lipozyme RM, respectively, in alcoholysis of tripalmitin and tristearin. Effect of a_{W}: Higher yield and less MG was obtained from alcoholysis at a_{W} 0.11 than 0.43. It was found that MG was increased with increasing a_{W}. Effect of solvents (on yield and acyl migration): Highest yield was obtained with MTBE. Alcoholysis in n-hexane and isooctane gave moderate yield, while acetone was a poor solvent for Lipozyme RM. The reaction performed in n-hexane showed faster acyl migration than in MTBE, as illustrated in FIGS. 18 and 19. FIG. 19 illustrates data from the hydrolysis of trilaurin at 60° C. by Lipozyme RM IM™ (DG dilaurin).

[0774] Hydrolysis of Triglycerides

[0775] Hydrolysis of pure triglycerides (TGs), including trilaurin, tripalmitin and tristearin, was carried out. A high amount of FFA was produced during the reaction and high amount of unreacted TG remained in the reaction mixture. Most DG was 1,2-DG. Hydrolysis reaction showed higher acyl migration than alcoholysis reaction.

[0776] Effect of amount of water: highest yield was obtained using TG:water ratio of 1:1, as illustrated in FIG. 20. FIG. 20 shows the effect of trilaurin:water ratio on hydrolysis of trilaurin in MTBE at 60° C. by Lipozyme RM IM™ (DG=1,2-dilaurin+1,3-dilaurin, MG=monolaurin). The amount of MG was increased with increasing TG:water ratio, especially in MTBE.

[0777] Effect of solvents: the result was corresponding to the result obtained from alcoholysis reaction. Hydrolysis in MTBE allowed higher yield than in n-hexane, isooctane and acetone, respectively, as illustrated in FIG. 21. FIG. 21 summarizes data showing the effect of organic solvents on hydrolysis of trilaurin at 60° C. using Lipozyme RM IM™ (DG=1,2-dilaurin+1,3-dilaurin, MG=1-monolaurin+2-monolaurin). Though reaction in MTBE gave higher yield, high amount of FFA was produced and lower acyl migration was found than in n-hexane. The separation of TG, DG, MG and FFA can be a problem.

[0778] Alcoholysis and Hydrolysis of Natural Oils

[0779] Alcoholysis and hydrolysis of natural oils, including coconut and palm kernel oils, was carried out. The 1,3-DG yield of reaction with natural oils was slightly less than the yield of alcoholysis and hydrolysis of pure TG. The highest DG yield (45-50%) and fastest reaction rate was obtained from alcoholysis in MTBE at 40° C. by D-EP100, as illustrated in FIG. 22. FIG. 22 shows the results of alcoholysis and hydrolysis of coconut oil in organic solvent at 40° C. (TG:ethanol=1:1 mol/mol, TG:water=1:2 mol/mol). Lipozyme RM IM™ gave higher yield and less MG than Lipozyme TL™. Reaction performed in MTBE gave higher yield and faster reaction rate than in n-hexane and acetone, respectively.

[0780] Induction of Acyl Migration

[0781] Acyl migration was carried out on natural oils, including coconut and palm kernel oils. The effect of temperature and carrier was not clear. Almost no acyl migration was observed after 72 h. Addition of oleic acid to the reaction mixture slightly induced acyl migration, as illustrated in FIG. 23. FIG. 23 shows the effect of oleic acid on acyl migration of 1,2-dipalmitin in n-hexane at room temperature. The acyl migration rate was increased with increasing oleic acid: 1,2-DP ratio.

[0782] Anion exchangers showed high induction of acyl migration, while cation exchange showed no effect. The acyl migration rate was increased with increasing amount of anion exchanger, as illustrated in FIG. 24. FIG. 24 shows the effect of the amount of anion exchanger on acyl migration of 1,2-dipalmitin (5 mg/ml) in n-hexane at room temperature. A large amount of anion-exchanger was required to induce a fast acyl migration.

[0783] Esterification of 1,3-DG and FFA/FAVE

[0784] Esterification of 1,3-DLa and OA in n-hexane was carried out with immobilized lipase from Pseudomonas sp. (Amano PS-D), Candida antarctica type A (CAL-A), and Penicillium cyclopium (Lipase G). Molecular sieve was added to the reaction mixtures to remove the produced water. It was found that only PS-D was capable of catalyzing the esterification reaction of 1,3-DG and oleic acid (OA) or vinyl oleate (OAVE). The reaction was fast. Almost all 1,3-DG was consumed after 2 h for 1,3-DCy and 8 h for 1,3-DLa.

[0785] Table 1 shows the fatty acid compositions of the ST products thus obtained. By-products of CyOO and OOO were present due to the non-specificity of PS-D, as illustrated in FIG. 25. FIG. 25 shows data from the esterification in larger scale of 1,3-dicaprylin and oleic acid vinyl ester in n-hexane at 60° C. by the immobilized lipase from a Pseudomonas sp. (PS-D). Acylglycerol composition was analyzed by HPLC.

TABLE 1
Fatty acid composition of structured triglycerides products.

| | Fatty acids (%)* | | |
|---|---|---|---|
| Structured triglycerides | C8:0 | C12:0 | C18:1 |
| CyOCy | 61.0 | — | 39.0 |
| LaOLa | — | 63.3 | 36.7 |
| CyOCy (larger scale) | 66.9 | — | 33.1 |

*determined by GC analysis

[0786] Vinyl oleate (OAVE) allowed much faster reaction than OA and 1,3-DCy allowed faster reaction than 1,3-DLa, as illustrated in FIG. 26. FIG. 26 shows data from the esterification of 1,3-DG and oleic acid (C18:1) or oleic acid vinyl ester (OAVE) in n-hexane at 60° C. using PS-D. Acylglycerol composition was determined by TLC/FID (Cy=reaction with 1,3-dicaprylin, La=reaction with 1,3-dilaurin, TG=triglycerides, DG 1,3-diglycerides, VE=vinyl ester).

### Example 8

### Protease Activity Assays

[0787] The following example describes exemplary protease activity assays to determine the catalytic activity of a protease (e.g., an enzyme of the invention). These exemplary assays can be used to determine if a polypeptide (e.g., a protease) is within the scope of the invention.

[0788] The activity assays used for proteinases (active on proteins) include zymograms and liquid substrate enzyme assays. Three different types of zymograms were used to measure activity: casein, gelatin and zein. For the liquid substrate enzyme assays, three main types were used: gel electrophoresis, O-pthaldialdehyde (OPA), and fluorescent end point assays. For both the gel electrophoresis and OPA assays, four different substrates were used: zein, Soybean Trypsin Inhibitor (SBTI, SIGMA-Aldrich, T6522), wheat germ lectin and soybean lectin. The substrate for the fluorescent end point assay was gelatin.

[0789] The activity assays used for proteinases and peptidases (active on peptides) used pNA linked small peptide substrates. The assays included specificity end point assays, unit definition kinetic assays and pH assays.

[0790] The following example describes the above-mentioned exemplary protease activity assays. These exemplary assays can be used to determine if a polypeptide is within the scope of the invention.

[0791] Protein (Proteinase Activity)

[0792] Casein Zymogram Gel Assays

[0793] Casein zymogram gels were used to assess proteinase activity. The protease activity assays were assessed using 4-16% gradient gels (Invitrogen Corp., Carlsbad, Calif.) containing casein conjugated to a blue dye and embedded within the gel matrix. All zymogram gels were processed according to the manufacturer's instructions. Briefly, each sample was mixed with an equal volume of 2× loading dye and incubated without heating for ten minutes before loading. After electrophoresis, gels were incubated in a renaturing buffer to remove the SDS and allow the proteins to regain their native form. Gels were then transferred to a developing solution and incubated at 37° C. for 4 to 24 hours. If a protease digests the casein in the gel, a clear zone is produced against the otherwise blue background that corresponds to the location of the protease in the gel. Negative controls (indicated with NC on gel images) were processed along with the experimental samples in each experiment and electrophoresed on the casein zymograms next to their corresponding protease(s).

[0794] Unlike traditional SDS-PAGE, samples are not heat denatured prior to electrophoresis of casein zymograms. As a result, it is sometimes difficult to accurately assess the molecular weight of the proteases. For example, Subtilisin A (Sigma, P5380, indicated with Subt.A on the gel images), which was used as a positive control in these experiments, is predicted to be approximately 27 kDa in size. However, when electrophoresed through casein zymograms using the conditions described, Subtilisin A barely migrates into the gel and is visible only above 183 kDa. Therefore, the zymograms do not define the MW of the proteases indicated, but rather used as an indicator of activity.

[0795] Gelatin Zymogram Assays

[0796] Gelatin zymograms, NOVEX® Zymogram Gels, were performed according to manufacturer's instructions (Invitrogen Corp., Carlsbad, Calif.). Unlike the casein zymograms, gelatin zymograms were post-stained following development using either a Colloidal Blue Staining Kit or the SIMPLYBLUE™ Safestain, (both from Invitrogen). Areas of protease activity appeared as clear bands against a dark background.

[0797] Corn Zein Assays

[0798] Corn zein was used as substrate for protease activity assays, using powder, Z-3625 (Sigma Chemical Co. St. Louis, Mo.), and Aquazein, 10% solution (Freeman Industries, Tuckahoe, N.Y.). When fractionated through a SDS-PAGE gel, zein from both suppliers produced bands of 24 and 22 kDa. The two zein bands correspond in molecular weight to those previously described for alpha-zein, the most abundant subclass of zeins, which are estimated to comprise 71-84% of total zein in corn (see, e.g., Consoli (2001) Electrophoresis 22:2983-2989).

[0799] Lyophilized culture supernatants containing active protease were resuspended, dialyzed, and incubated with zein in 50 mM KPO₄, pH 7.5. Reactions were run in a 96-well microtiter format. “Substrate only” and “enzyme preparation only” controls were processed as well as experimental samples. After 24 hours at 30° C., aliquots were removed and subjected to OPA, SDS-PAGE, or Zymogram analysis. In some cases, fresh aliquots were removed and analyzed after 48 or 72 hours at 30° C.

[0800] Zein Zymogram: Aquazein was added to a final concentration of 0.075% in a 10% polyacrylamide gel. Aliquots of dialyzed protease samples were electrophoresed through the zein zymogram using standard conditions. Following electrophoresis, the zymogram gel was washed, incubated in a renaturing buffer, incubated overnight in a developing buffer optimized for protease activity (contains NaCl, CaCl₂, and Brij 35, in Tris buffer pH 8), and stained with Coomassie blue stain.

[0801] SDS-PAGE: Aliquots of equal volume were removed from each sample and subjected to SDS-PAGE analysis. Following electrophoresis, proteins in the gels were stained with SYPRO Orange (Molecular Probes) and visualized using UV transillumination.

[0802] OPA: In the presence of Beta-mercaptoethanol (BME), OPA reacts with free amino ends to produce a fluorescent imidazole that can be detected using a standard fluorescence plate reader. In this assay, aliquots of equal volume were removed from each sample and placed in a black fluorescence plate. Samples were then diluted 1:10 in OPA reagents. Fluorescence (Ex=340 nm, Em=450 nm) was determined after a 5-minute incubation.

[0803] Soybean Trypsin Inhibitor Assays

[0804] Soybean Trypsin Inhibitor (SBTI, SIGMA-Aldrich, T6522) was used as a substrate for protease activity. Lyophilized culture supernatants containing active protease were resuspended, dialyzed, and incubated with SBTI (1 mg/ml final conc.) at 37° C. in 50 mM KPO₄, pH 7.5. Substrate alone and enzyme preparation alone controls were processed along with experimental samples. After 24 hours, aliquots were removed and subjected to OPA and SDS-PAGE analysis. SDS-PAGE: for SBTI, following electrophoresis, proteins in the gels were stained with Coomassie blue.

[0805] Wheat Germ Lectin Assays

[0806] Wheat germ lectin (WGA, EY Laboratories, L-2101, Pure) was used as a substrate for protease activity. Lyophilized culture supernatants containing active protease were resuspended, dialyzed, and incubated with WGA (1 mg/ml final concentration) at 37° C. in 50 mM KPO₄, pH 7.5. Substrate alone and enzyme preparation alone controls were processed along with experimental samples. After 24 hours, aliquots were removed and subjected to OPA and SDS-PAGE analysis as. SDS-PAGE: for WGA, following electrophoresis, proteins in the gels were stained with Coomassie blue.

[0807] Soybean Lectin Assays

[0808] Soybean lectin (SBA, EY Laboratories, L-1300, Crude) was used as a substrate for protease activity. Lyophilized culture supernatants containing active protease were resuspended, dialyzed, and incubated with SBA (1 mg/ml final concentration) at 37° C. in 50 mM KPO₄, pH 7.5. Substrate alone and enzyme preparation alone controls were processed along with experimental samples. After 24 hours, aliquots were removed and subjected to OPA and SDS-PAGE analysis. SDS-PAGE: for SBA, following electrophoresis, proteins in the gels were stained with Coomassie blue.

[0809] Gelatin in Fluorescent Liquid End Point Assay

[0810] DQ Gelatin (Molecular Probes, fluorescein conjugate, D-12054) was used to assess the proteolytic activity of the proteases of the invention. DQ gelatin is a protein that is so heavily labeled with a fluorophore that its fluorescence is quenched when the molecule is intact. Proteases that cleave the substrate will release the fluorophores from internal quenching and fluorescence will increase in proportion to the protease activity. DQ Gelatin was diluted to a final concentration of 25 ug/ml in 100 ul reactions containing a suitable buffer such as zymogram developing buffer (Invitrogen) and varying amounts of protease preparations. Reactions were incubated in a 384 well, clear, flat-bottom microtiter plate at 37° C. for various time periods from 1 hr to overnight. Fluorescence was monitored using a fluorescence plate reader after incubation at 37° C. for various times.

### Example 9

### Simulation of PLC-Mediated Degumming

[0811] This example describes an exemplary use of a hydrolase of the invention, a phospholipase of the invention, comprising the simulation of phospholipase C (PLC)-mediated degumming.

[0812] Due to its poor solubility in water phosphatidylcholine (PC) was originally dissolved in ethanol (100 mg/ml). For initial testing, a stock solution of PC in 50 mM 3-morpholinopropanesulpholic acid or 60 mM citric acid/NaOH at pH 6 was prepared. The PC stock solution (10 μl, 1 μg/μl) was added to 500 μl of refined soybean oil (2% water) in an Eppendorf tube. To generate an emulsion the content of the tube was mixed for 3 min by vortexing. The oil and the water phase were separated by centrifugation for 1 min at 13,000 rpm. The reaction tubes were pre-incubated at the desired temperature (37° C., 50° C., or 60° C.) and 3 μl of PLC from Bacillus cereus (0.9 U/μl) were added to the water phase. The disappearance of PC was analyzed by TLC using chloroform/methanol/water (65:25:4) as a solvent system (see, e.g., Taguchi (1975) supra) and was visualized after exposure to 12 vapor. The oil and water phases are separated after centrifugation and PLC is added to the water phase, which contains the precipitated phosphatides (“gums”). The PLC hydrolysis takes place in the water phase. The time course of the reaction is monitored by withdrawing aliquots from the water phase and analyzing them by TLC.

### Example 10

### Expression of Hydrolases (e.g. Phospholipases) of the Invention

[0813] This example describes the construction of a commercial production strain of the invention that can express multiple hydrolases of the invention, e.g., phospholipase enzymes of the invention. In order to produce a multi-enzyme formulation suitable for use in the degumming of food-grade vegetable oils (including soybean, canola, and sunflower), a recombinant expression strain can be generated that expresses two different hydrolases of the invention, e.g., phospholipase enzymes of the invention, in the same expression host. For example, this strain may be constructed to contain one or more copies of a hydrolase (e.g., a PLC) gene and one or more copies of another hydrolase gene (e.g., a phosphatidylinositol-PLC gene). These genes may exist on one plasmid, multiple plasmids, or the genes may be inserted into the genome of the expression host by homologous recombination. When the genes are introduced by homologous recombination, the genes may be introduced into a single site in the host genome as a DNA expression cassette that contains one or more copies of both genes. Alternatively, one or more copies of each gene may be introduced into distinct sites in the host chromosome. The expression of these two gene sequences could be driven by one type of promoter or each gene sequence may be driven by an independent promoter. Depending on the number of copies of each gene and the type of promoter, the final strain will express varying ratios of each active enzyme type. The expression strains can be constructed using any Streptomyces or Bacillus, Bacillus cereus, E. coli, S. pombe, P. pastoris, or other gram-negative, gram-positive, or yeast expression systems.

[0814] In one aspect, the invention provides a two-enzyme system for degumming of soybean oil, wherein at least one enzyme is a hydrolase enzyme of the invention. PLC plus PI-PLC produces more DAG than either enzyme alone. However both enzymes produce more DAG than a no enzyme control sample. In one aspect, reaction conditions comprise 1 milliliter soybean oil, ˜0.4% initial moisture, 50° C., 0.2% Citric acid neutralized with 2.75M NaOH, 10 U PLC, 15 μL PI-PLC (0.45 mg total protein), 1 hour total reaction time. FIG. 31 illustrates a table summarizing data from this two-enzyme degumming system of the invention.

[0815] In another aspect, a PI-PLC enzyme of the invention can be used under the same conditions described for PLC. These include chemical refining of vegetable oils and water degumming of vegetable oils.

### Example 11

### Screening and Characterization of Hydrolases of the Invention

[0816] This example describes exemplary methods for screening and characterizing hydrolases of the invention for, e.g., determining of a polypeptide is within the scope of the invention. In one aspect, enzymes are tested for their ability to reduce lipophilic extractives from wood pulp.

[0817] Thermotolerance: In one aspect, lipases and esterases are tested for thermotolerance. For this test, a surrogate substrate such as umbelliferyl heptanoate can be used to simplify and speed up the tests. This can be run in parallel with the steryl esters activity test, below. Results of these tests will enable thermotolerant enzymes to be prioritized in testing their substrate scope.

[0818] Steryl ester activity: In one aspect, lipases and esterases are tested for activity on steryl esters. Results from thermotolerance tests (above) can be used to focus on thermotolerant enzymes (e.g., lipases) first. Steryl esterase activity can be measured using any commercially available cholesterol esters, e.g., cholesterol oleate, palmitate, stearate, linoleate, linolenate, since it has been reported that these function as good model substrates. In one aspect, initial screening is performed at 50° C. and pH 8 with cholesteryl oleate using a TLC method. In one aspect, lipases are tested first, then esterases. More quantitative analyses can utilize a colorimetric method based on cholesterol oxidase, e.g., as described in Appl. Microb. Biotech. 60:120-127 (2002); or, Mizoguchi (2004) J. Lipid Res. 45(2):396-401; Epub 2003 Oct. 16, describing a direct measurement method for the enzymatic determination of cholesteryl esters (CEs) without measuring total cholesterol (TC) and free cholesterol (FC). In brief, in the first step, hydrogen peroxide generated by cholesterol oxidase from FC is decomposed by catalase. In the second step, CE is measured by enzymatic determination using a colorimetric method or a fluorometric method. The measurement sensitivity of the fluorometric method is more than 20 times that of the colorimetric method. Active enzymes also can be tested for pH and temperature optima including activity at 80° C. and pH 10. Lipase activity of the top hits can be tested using an oil, e.g., a vegetable oil or an olive oil.

[0819] Applications tests: Enzymes also can be tested for their ability to reduce lipophilic extractives from wood pulp. An exemplary procedure is:

[0820] Handsheet physical properties: Handsheets can be made from pulp with and without esterase/lipase treatment. The effects of top enzymes can be investigated under different conditions and using different pulp types. Conditions and pulp types can vary. In one aspect, TAPPI methods for the measurement of tensile, burst and tear strength of handsheets are used.

[0821] Pulp pitch content: Lipophilic extractives may be measured by solvent extraction (dichloromethane or ethanol-benzene) using TAPPI Method 204 cm-97 (Solvent Extractives of wood and Pulp). Since the pulping process usually removes most water-soluble and volatile compounds that are also soluble in organic solvents, the solvent extractable material in pulp may be considered to consist primarily of resin and fatty acids and their esters, waxes and unsaponifiable substances.

[0822] Assays for Identifying and Characterizing Lipases and/or Steryl Esterases

[0823] As discussed above, the invention also provides methods, e.g., high throughput activity-based discovery assays, to characterize, identify and/or discover (new) hydrolases having, e.g., lipases and/or steryl esterase activity, or to determine if a polypeptide has hydrolase activity (and, e.g., is within the scope of the invention). These screening methods can use polypeptides, nucleic acids (e.g., hybridization probes) or antibodies of the invention. These aspects comprise generation and/or use of:

[0824] pitch biotrap libraries;

[0825] high throughput activity-based discovery assays, including high temperature assays;

[0826] sequenced-based screening of thermophilic environmental libraries, e.g., by automation, probes and/or degenerate PCR;

[0827] activity-based screening of environmental libraries.

[0828] Putative lipases genes with steryl esterase activity can be subcloned into expression hosts, characterized and evaluated.

[0829] Evolution-Generation of New Hydrolases, e.g., New Lipases, Steryl Esterases

[0830] As discussed above, the invention also provides methods for generating modified hydrolase enzymes based on the exemplary sequences of the invention, e.g., using GSSM, SLR and the like. Any sequence can be modified to generate a hydrolase or antibody having a desired enzymatic activity or binding specificity. In one aspect, an enzyme that shows good substrate scope (i.e. high lipase activity on triglycerides and good steryl esterase activity) but does not have the desired thermotolerance can be a candidate for sequence modification (“evolution”). Thermotolerance can be targeted via any method known in the art, including those described above, including GSSM, SLR.

[0831] After sequence modification, point mutations identified as beneficial may be combined in a combinatorial manner, e.g., using GeneReassembly, such as tunable GeneReassembly (TGR); see, e.g., U.S. Pat. No. 6,537,776). Alternatively, a hydrolase (e.g., a lipase) gene may be directly evolved by GeneReassembly. In one aspect, lead evolved enzymes are characterized and evaluated enzyme performance metrics.

[0832] Commercial Process Development

[0833] Enzymes of the invention are used in, and to develop, commercial-scale processes, e.g., in the hydrolysis of steryl esters and triglycerides (e.g., in a paper pulp), into sterols, glycerol and free fatty acids, using enzyme(s) of the invention. In one aspect, this involves evaluation of lead enzymes on various pulps (e.g., kraft pulps) under mill-specific conditions. In one aspect, optimization and scaled up production of the lead biocatalyst(s) is performed.

### Example 12

### Exemplary Lipase Assays

[0834] The following example describes exemplary assays to screen for lipase activity. In one aspect, these exemplary assays can be used as routine screens to determine if a polypeptide is within the scope of the invention. Such assays include use of pH indicator compounds to detect cleavage of fatty acids from triglycerides, spectrophotometric methods, HPLC, GC, MS, TLC and others. Jaeger (1994) FEMS Microbiol. Rev. 15:29-63; Ader (1997) Methods Enzymol. 286:351-386; Vorderwtilbecke (1992) Enzyme Microb. Technol. 14:631-639; Renard (1987) Lipids 22: 539-541.

[0835] In one aspect, the methods of the invention screen for regio-selective lipases, e.g., Sn-1, Sn-3 and/or Sn-3 regio-selective lipases. In one aspect, the substrates 1,3-diamide and 1,3-diether TAG analogues are used to target, or select for, Sn-2 selective lipases. In one aspect, the methods of the invention screen for lipases that exhibit regioselectivity for the 2-position of lipids, e.g., TAGs. Structured synthesis of lipids using Sn-2 selective lipases can be useful for the synthesis of a variety of TAGs, including 1,3-diacylglycerides (1,3-DAGs) and components of cocoa butter.

[0836] In one aspect, regio-selective lipases, including Sn-2 selective lipases, are characterized for regioselectivity using rigorous analytical methods. This can eliminate false results due to acyl migration. In one aspect, lipases are tested for Sn2 specificity using analytical methods such as NMR spectroscopy. Also, a structured triacylglyceride of the ABA-type (where A and B denote fatty acids distributed along the glycerol backbone) can be subjected to hydrolysis or alcoholysis using lipases (e.g. of the invention) followed by analysis of the partial glycerides and fatty acid (esters) formed. Alcoholysis conditions at controlled water activity, e.g. using primary alcohols such as methanol or ethanol are preferred as undesired acyl migration can be avoided need different references. Sn-2 selectivity of lipases was reported, however, the extent of sn-2 selectivity was very low (Briand (1995) Eur. J. Biochem. 228: 169-175; Rogalska (1993) Chirality 5, 24-30.

[0837] In one aspect, regio-selective lipases are assayed for their regio-specificity (Sn2 versus Sn1/Sn3 versus Sn1,3) on appropriate lipids, such as tripalmitin, tristearin, triolein, tricaprylin, and trilaurin, and also for their fatty acid specificity.

[0838] Screening for Lipase/Esterase Activity

[0839] Colonies are picked with sterile toothpicks and used to singly inoculate each of the wells of 96-well microtiter plates. The wells contained 250 μL of LB media with 100 μg/mL ampicillin, 80 μg/mL methicillin, and 10% v/v glycerol (LB Amp/Meth, glycerol). The cells were grown overnight at 37° C. without shaking. This constituted generation of the “Source GenBank.” Each well of the Source GenBank thus contained a stock culture of E. coli cells, each of which contained a pBluescript with a unique DNA insert.

[0840] Plates of the source GenBank were used to multiply inoculate a single plate (the “condensed plate”) containing in each well 200 μL of LB Amp/Meth, glycerol. This step was performed using the High Density Replicating Tool (HDRT) of a BIOMEK™ (Beckman Coulter, Inc., Fullerton, Calif.) with a 1% bleach, water, isopropanol, air-dry sterilization cycle in between each inoculation. Each well of the condensed plate thus contained 10 to 12 different PBLUESCRIPT™ (Stratagene, San Diego, Calif.) clones from each of the source library plates. The condensed plate was grown for 16 hours at 37° C. and then used to inoculate two white 96-well POLYFILTRONICS™ (Whatman) microtiter daughter plates containing in each well 250 μL of LB Amp/Meth (no glycerol). The original condensed plate was put in storage −80° C. The two condensed daughter plates were incubated at 37° C. for 18 hours.

[0841] The short chain esterase ‘600 μM substrate stock solution’ was prepared as follows: 25 mg of each of the following compounds was dissolved in the appropriate volume of DMSO to yield a 25.2 mM solution. The compounds used were 4-methylumbelliferyl proprionoate, 4-methylumbelliferyl butyrate, and 4-methylumbelliferyl heptanoate. Two hundred fifty microliters of each DMSO solution was added to ca 9 mL of 50 mM, pH 7.5 HEPES buffer which contained 0.6% of Triton X-100 and 0.6 mg per mL of dodecyl maltoside (Anatrace, Maumee, Ohio). The volume was taken to 10.5 mL with the above HEPES buffer to yield a slightly cloudy suspension.

[0842] The long chain ‘600 μM substrate stock solution’ was prepared as follows: 25 mg of each of the following compounds was dissolved in DMSO to 25.2 mM as above. The compounds used were 4-methylumbelliferyl elaidate, 4-methylumbelliferyl palmitate, 4-methylumbelliferyl oleate, and 4-methylumbelliferyl stearate. All required brief warming in a 70° C. bath to achieve dissolution. Two hundred fifty microliters of each DMSO solution was added to the HEPES buffer and diluted to 10.5 mL as above. All seven umbelliferones were obtained from Sigma Chemical Co. (St. Louis, Mo.).

[0843] Fifty μL of the long chain esterase or short chain esterase ‘600 μM substrate stock solution’ was added to each of the wells of a white condensed plate using the BIOMEK™ to yield a final concentration of substrate of about 100 μM. The fluorescence values were recorded (excitation=326 nm, emission=450 nm) on a plate-reading fluorometer immediately after addition of the substrate. The plate was incubated at 70° C. for 60 minutes in the case of the long chain substrates, and 30 minutes at RT in the case of the short chain substrates. The fluorescence values were recorded again. The initial and final fluorescence values were compared to determine if an active clone was present.

[0844] To isolate the individual clone which carried the activity, the Source GenBank plates were thawed and the individual wells used to singly inoculate a new plate containing LB Amp/Meth. As above, the plate was incubated at 37° C. to grow the cells, 50 μL of 600 μM substrate stock solution was added using the BIOMEK™ and the fluorescence was determined. Once the active well from the source plate was identified, cells from this active well were streaked on agar with LB/Amp/Meth and grown overnight at 37° C. to obtain single colonies. Eight single colonies were picked with a sterile toothpick and used to singly inoculate the wells of a 96-well microtiter plate. The wells contained 250 μL of LB Amp/Meth. The cells were grown overnight at 37° C. without shaking. A 200 μL aliquot was removed from each well and assayed with the appropriate long or short chain substrates as above. The most active clone was identified and the remaining 50 μL of culture was used to streak an agar plate with LB/Amp/Meth. Eight single colonies were picked, grown and assayed as above. The most active clone was used to inoculate 3 mL cultures of LB/Amp/Meth, which were grown overnight. The plasmid DNA was isolated from the cultures and utilized for sequencing.

### Cholesteryl Esterase Activity Assay

[0845] Diversa lipase collection was screened for steryl esterase activity using cholesteryl esterase as model substrate. Assays were run as described in Tenkanen et al. (2002) Appl. Microbiol. Biotechnol. 60:120-127. Cleared cell lysates were pre-incubated at 60° C. for 20 min. and the enzyme assay was performed at 70° C. over night.

[0846] Pulp Strength Enhancement Application Assay

[0847] Prior to enzyme treatment, a sample of pulp is adjusted to a desired consistency (4% solids to liquid) and pH (4-8). The resulting slurry is deposited into a stainless steel vessel of appropriate size and heated to the reaction temperature of interest (50-80° C. using a LABOMAT™ (Mathis U.S.A. Inc, Concord, N.C.). The sample is then dosed with a desired quantity of enzyme (1-1000 ppm) and incubated for a specified length of time (5-180 min). Aluminum sulfate is added at a concentration equal to 2% of the weight of the pulp and the sample is incubated for an additional 45 minutes and subsequently de-watered by pouring the slurry over a mesh screen attached to a vacuum flask. Handsheets are prepared from the filtered pulp according to TAPPI T 205 “Forming Handsheets for Physical Tests of Pulp” and paper strength measurements are executed in accordance with TAPPI T 494 “Tensile Properties of Paper and Paperboard (Using Constant Rate of Elongation Apparatus).

[0848] Extraction of Lipophilic Compounds from Handsheets

[0849] This exemplary extraction method is adapted from TAPPI T 204 “Solvent Extractives of Wood and Pulp.” Handsheets undergoing accelerated solvent-based extraction using the ASE 100 (Dionex Corporation, Sunnyvale Calif.) are first homogenized in a coffee-style electric grinder for 30 seconds. One gram of the blended paper is inserted into a 10-mL extraction cell and placed into the preheated ASE 100 oven (120 C). The extraction program is performed at 1500 psi and consists of 5×8 minute static cycles using a total of approximately 40 mL CH2C12. The extract produced from this method is evaporated until dry and dissolved in 1 mL CHCl3 for HPLC analysis.

### HPLC Analysis of Lipophilic Extracts

[0850] Normal phase HPLC analysis of lipophilic handsheet extractives was performed using an 1100 series HPLC system (Agilent Technologies Inc., Wilmington, Del.) equipped with an Agilent Multichannel Interface 35900 connected to an Evaporative Light Scattering Detector (ELSD SEDEX 75, SEDERE, France). Normal phase Chromegasphere S160 analytical column (ES Industries, West Berlin, N.J.), 15 cm×4.6 mm, 10 um, 60 Å, was employed. The column was thermostated at 40° C., mobile phase flow was 2 ml/min, and gradient elution with hexane (solvent A) and hexane/isopropanol/ethylacetate/formic acid (800:100:100:1) (solvent B) was used to achieve efficient separation of pulp and paper extractives in under 15 min. The table below depicts the gradient elution method used.

| Time, min | Solvent A, % | Solvent B, % |
|---|---|---|
| 0 | 98 | 2 |
| 8 | 65 | 35 |
| 8.5 | 2 | 98 |
| 10 | 2 | 98 |
| 10.1 | 98 | 2 |
| 15 | 98 | 2 |

ELSD measurements were performed at the evaporation tube temperature of 43° C. and nebulizer gas (N2) pressure of 3.3 bars. CHEMSTATION™ software (Agilent) was used for data acquisition and analysis. Methylene chloride sample extracts were dried down in glass beakers followed by re-suspension in equal volumes of chloroform. 5 μL injections provided adequate sensitivity at the detector gain setting of 7. For quantitative analysis the following reagents were used as standards to obtain calibration curves (in log/log format since the detector response is essentially non-linear) in 0.05-0.8 mg/mL range: cholesterol myristate, tripalmitin, palmitic acid, 1,3 dipalmitin, 1,2 dipalmitin, cholesterol, 1-monopalmitin and 2-monopalmitin (all from Sigma-Aldrich).

[0851] Annotation of Open Reading Frames.

[0852] Sequenced DNA fragments encoding esterase activity were annotated using a fully automated annotation pipeline program. In brief, open reading frames (ORFs) were identified and then compared to publicly available protein sequences using standard procedures, e.g., BLASTP, SignalP, and Hidden Markov Models homology searches.

### Results

[0853] Paper Strength Enhancement

[0854] Paper strength measurements were executed according TAPPI methods on handsheets prepared according TAPPI methods (see materials and methods). FIG. 32 shows the dose dependency of an exemplary lipase of the invention SEQ ID NO:988 (encoded, e.g., by SEQ ID NO:987) on tensile handsheet strength.

[0855] Lipophilic extracts from the handsheets analyzed for tensile strength were analyzed using normal phase HPLC with ELSD detection method as described above. FIG. 33 shows the composition and amount of lipophilic extracts in the handsheets after treatment with increasing amounts of the exemplary enzyme SEQ ID NO:988 (increasing from 0 ppm, 1 ppm, 10 ppm, 100 ppm and 1000 ppm enzyme). In FIG. 33, 1=SE (Chol. myr.); 2=TAG; 3=FFA; 4=1,3-DAG; 5═S (Chol); 6=1,2-DAG; 7=1-MAg; see also discussion on FIGS. 32 and 33, below. The data of FIG. 33 clearly demonstrates that enzymes of the invention, e.g., the exemplary enzyme SEQ ID NO:988, are effective in (a dose-dependent manner) reducing the amount of “pitch” (lipophilic extracts, including steryl esters, triacylglycerols) in pulp.

[0856] There is a clear correlation in handsheet tensile strength and lipophilic content in the handsheet. Higher the enzyme dosage less steryl esters and triglycerides and consequently stronger paper.

[0857] Exemplary Esterase Sequences Fall into Four Different Sequence Families

[0858] The exemplary polypeptide having the sequence SEQ ID NO:986, encoded, e.g., by SEQ ID NO:985, has lipase activity, and in one aspect, alpha beta hydrolase activity. SEQ ID NO:985, encoding the alpha beta hydrolase SEQ ID NO:986, is a gene belonging to the alpha beta hydrolase superfamily of enzymes; it has weak homology to the X-pro dipeptidyl peptidase (S15 family). There are only five known homologs of this gene in Genbank.

[0859] The exemplary polypeptide having the sequence SEQ ID NO:604, encoded, e.g., by SEQ ID NO:603, has lipase activity, and in one aspect, alpha beta hydrolase activity. This gene is homologous to the sequences SEQ ID NO:985 and SEQ ID NO:986.

[0860] The exemplary polypeptide having the sequence SEQ ID NO:92, encoded, e.g., by SEQ ID NO:91, has lipase activity. This gene is a homolog of a well established lipase family of which many members have been seen in Pseudomonas species.

[0861] The exemplary polypeptide having the sequence SEQ ID NO:48, encoded, e.g., by SEQ ID NO:47, has lipase activity, and in one aspect, alpha beta hydrolase activity. This lipase is a member of the alpha beta hydrolase superfamily.

[0862] The exemplary polypeptide having the sequence SEQ ID NO:988, encoded, e.g., by SEQ ID NO:987, has lipase activity, and in one aspect, alpha beta hydrolase activity. This gene is a unique lipase with only one other homolog in Genbank that is annotated as hypothetical. The gene is a member of the alpha beta hydrolase superfamily and is probably of archaeal origin.

[0863] The enzymes and methods of the invention provide thermomechanical paper with a variety of desired properties, including:

[0864] Printability

[0865] Strength (mainly tensile)

[0866] Softwood pulp reduction

[0867] Ability to add more filler(s)

[0868] Stiffness

[0869] Density

[0870] Brightness

[0871] Opacity

### Paper Strength Enhancement

[0872] The invention provides enzymes and methods for increasing paper strength by decreasing the lipophilic extractives (the amount of “pitch”) generated during wood pulping and similar industrial protocols. Lipophilic extractives are insoluble and poorly removed in process water, and reduce paper strength and quality. Pitch deposits can cause problems in mills. The enzymes and methods of the invention address these issues for both mechanical and chemical pulps.

[0873] The enzymes and methods of the invention can be used to reduce various types of lipophilic extractives, including:
[0874] Triglycerides
[0875] Steryl esters
[0876] FFAs, sterols, resin acids

[0877] Exemplary lipases of the invention can have varied properties, e.g.:
[0878] Exemplary lipases of the invention can have broad lipase activity on wood triglycerides;
[0879] Exemplary lipases of the invention can be mostly active on palmitic, oleic, linoleic, linolenic and pinolenic groups;
[0880] Exemplary lipases of the invention can be active on steryl esters;
[0881] Exemplary lipases of the invention can be active in high temperatures; e.g., up to about 80° C., 85° C. or 90° C. or more, and can be active at acidic pHs, e.g., a range of pH between about 4 to 6.
   In one aspect, the compositions and methods of the invention are practiced in conjunction with known enzymes, e.g., existing lipases, e.g., RESINASE™, Novozymes, which may not work on steryl esters and may have limited temperature performance.

### Mechanical Pulp Strength Improvement

[0882] In one aspect, the compositions and methods of the invention are used for the 1 removal of triglycerides and steryl esters, e.g., from pulp, e.g., paper pulp, kraft pulp, groundwood, including mechanical pulp fibers; this removal can improve interfiber bonding, i.e., strength. In various aspects, benefits incurred using the compositions and methods of the invention:
[0883] Reduction of expensive chemical pulp for strength reinforcement;
[0884] Increased addition of fillers (clay, calcium carbonate) for improved printability, reduced fiber cost; or
[0885] Reduction of pitch related operational problems.
   The exemplary enzyme of the invention SEQ ID NO:988 (encoded, e.g., by SEQ ID NO:987) imparts an about 10% to 18% tensile strength improvement.

[0886] Thus, the invention provides an enzyme-based processing enzyme and method for increasing thermomechanical pulp (TMP) strength. In one aspect, the enzyme-based processing protocols of the invention can hydrolyze “lipophilic extractives”, e.g., steryl esters and/or triglycerides (the so-called “pitch”), present in a pulp or similar wood-based extract. Thus, in one aspect, the enzyme-based processing protocols of the invention are used to reduce the amount of “pitch” in a pulp, wood extract and the like. In alternative embodiments, enzymatic treatment is “pitch neutral” or, alternatively, “pitch negative”. It is well known that there is an inverse relationship between the amount of “lipophilic extractives”, e.g., steryl esters and/or triglycerides (the so-called “pitch”) present and paper strength, and the enzymes of the invention can be used to reduce pitch and increase paper strength. The improvement in thermomechanical pulp strength attained by practicing this invention also subsequently reduces the amount of kraft pulp needed, reduces the basis weight and reduces the amount of refining energy needed. Practicing this invention yields value generation from kraft pulp reduction, basis weight reduction and energy reduction.

[0887] In one aspect, a steryl esterase screen is used to determine/confirm the activity of an enzyme of the invention, or to determine if a polypeptide has the requisite activity to fall within the scope of this invention. One exemplary assay comprises:
[0888] a TLC assay using cholesterol oleate and cholesterol as substrates;
[0889] background host activity was inactivated by pre-heating at 60° C.;
[0890] assay run over-night at 70° C., pH 7.4;

[0891] Five exemplary enzymes were found by this assay, and they are discussed in detail, above, and in summary include: exemplary polypeptide SEQ ID NO:986, encoded, e.g., by SEQ ID NO:985, having lipase activity, and in one aspect, alpha beta hydrolase activity, has weak homology to the X-pro dipeptidyl peptidase; exemplary polypeptide SEQ ID NO:604, encoded, e.g., by SEQ ID NO:603, having lipase activity, and in one aspect, alpha beta hydrolase activity, and is homologous to the sequences SEQ ID NO:985 and SEQ ID NO:986; exemplary polypeptide SEQ ID NO:92, encoded, e.g., by SEQ ID NO:91, has lipase activity, is a homolog of a well established lipase family of which many members have been seen in Pseudomonas species; exemplary polypeptide SEQ ID NO:48, encoded, e.g., by SEQ ID NO:47, has lipase activity, and in one aspect, alpha beta hydrolase activity, and is a member of the alpha beta hydrolase superfamily, and has weak homology to putative secreted lipases from Streptomyces species; exemplary polypeptide SEQ ID NO:988, encoded, e.g., by SEQ ID NO:987, has lipase activity, and in one aspect, alpha beta hydrolase activity, is a unique lipase. See FIG. 34, for a table summarizing the characteristics of these exemplary enzymes.

[0892] The residual activity of two versions of the exemplary polypeptide SEQ ID NO:988 was tested after a 80° C., 85° C. or 90° C. heat treatment—one version was expressed in a Pichia host cell, and the other version in an E. coli host cell. The Pichia-produced SEQ ID NO:988 enzyme displayed greater thermo-tolerance at 80° C. than the SEQ ID NO:988 enzyme expressed in E. coli; with Vmax of the Pichia-produced SEQ ID NO:988 enzyme between about 300,000 and 350,000, and with Vmax of the E. coli-produced SEQ ID NO:988 enzyme at about 150,000 (between about 15 minutes and 150 minutes). This activity data correlated with a loss of recombinant SEQ ID NO:988 protein over the 80° C., 85° C. or 90° C. heat treatment range, e.g., as visualized by SDS-PAGE.

[0893] Chromatography analysis of tryptic peptides of the Pichia-produced and E. coli-produced SEQ ID NO:988 enzyme showed no evident post-translational modification.

[0894] Strength Aspect—TMP/Kraft blends

[0895] Using unbleached post-O₂ Kraft pulp, it was shown that paper strength is directly correlated to the quantity of Kraft pulp contained in the blend, as shown in FIG. 35. Based upon this relationship, a certain amount of lipase-treated thermomechanical pulp (TMP) can be substituted for Kraft pulp without a loss of strength. All Kraft pulps do not have this linear correlation. Both tensile strength and paper elasticity improve with increasing Kraft pulp additions, as illustrated in FIG. 36 (the area under the curve is a measure of paper “toughness”).

[0896] This study was done first without enzyme to determine to what extent a Kraft pulp addition contributes to the ultimate strength of a blended paper furnish. The main reason that thermo-mechanical pulp is blended with the more expensive “Kraft pulp” is to improve on the strength characteristics of the final product; also, Kraft pulp contains no lipophilic compounds. By replacing standard TMP with lipase-treated TMP that we could subsequently reduce the amount of Kraft pulp needed in the blend to obtain paper of the required strength. The data from FIG. 35 was obtained by first making a series of 2.0 g handsheets composed of varied amounts of mechanical and Kraft pulps and then measuring their inherent tensile strength. In this example, the Kraft was approximately two times (2×) stronger than the TMP, each “10 point” addition of Kraft yielded a 7% stronger paper.

### Strength Aspect—Basis Weight

[0897] Using Irving TMP (New Brunswick, Canada) it was shown that paper strength is directly correlated to weight of the paper, as illustrated in FIG. 37. Based upon this relationship, a lower amount of lipase-treated pulp (TMP) could be used and still have the same (tensile) strength properties. Both tensile strength and paper elasticity improved with increasing Handsheet weight (1.25 g (lower), 2.5 g (middle), 5.0 g (upper); grams O.D. pulp), as illustrated in FIG. 38. Area under the curve is a measure of paper “toughness”.

[0898] The “basis weight” idea from FIG. 37 refers to the thickness of the paper. That is to say that these handsheets are the same size in two dimensions, but different amounts of pulp went into each sheet. The data is produced by simply feeding varied amounts of pulp into the handsheet maker, allowing the sheets to dry, then evaluating their tensile strength. By treating the pulp with a lipase of the invention, a paper that is thinner than that made from untreated pulp is produced without sacrificing any strength properties.

[0899] Tensile Strength Improvement

[0900] Using the exemplary enzyme SEQ ID NO:988, up to an approximately 18% improvement in tensile strength was obtained, see FIG. 32 (and discussion, above). Briefly, 2 grams of TMP (from Irving of New Brunswick, Canada) is added to a 50 mM NA acetate buffer (pH 5) at a consistency of 4% solids. The slurry is put into a LABOMAT™ beaker, the temperature is brought to 60° C. (in this case), held for 45 minutes, 1% aluminum sulfate is added, the temperature is raised to 80° C., the pulp is drained, handsheets are made from the pulp, and they are tested in accordance with TAPPI methods for tensile strength. Each bar on this graph (FIG. 32) represents the average of two samples at a particular enzyme dose (1 ppm=1 microgram enzyme/gram of solid pulp) with I upper and lower standard deviation in the error bars.

[0901] The amount of improvement depends heavily on type of pulp treated and treatment conditions. There was a clear correlation between tensile strength and lipophilic content, as illustrated in FIG. 32, also discussed above. FIG. 33, also discussed above, illustrates the effectiveness of enzymes of the invention in reducing the lipophilic content (the amount of pitch) in pulps, thereby increasing their tensile strength.

[0902] Kraft Pulp Reduction

[0903] Tensile strength was tested in (a) a 60%/40% TMP/kraft pulp blend or (b) a 70%/30% TMP/kraft pulp blend after treatment with 10 ppm of the exemplary enzyme SEQ ID NO:988. This experiment mimics the “blend chest” conditions found in a pulp mill; it's same protocol as discussed above (for FIG. 32) except that TMP and Kraft pulp are blended in the given ratios (e.g. for a 2 g handsheet at 60/40, there's 1.2 g TMP and 0.8 g Kraft pulp) at a 2% solids consistency at pH 6 and incubated for 90 minutes at 60° C. in duplicates. One set received a 10 ppm enzyme dose and the other did not. Handsheet formation and physical testing was the same. By using lipase-treated TMP, a given blend requires 25% less Kraft pulp than it would if it were to use non-treated TMP in order to achieve the same tensile strength.

[0904] The results, as illustrated in FIG. 39, showed that lipase-treated TMP (70%/30% TMP/kraft pulp blend)—particularly, TMP treated with a lipase of the invention, e.g., the exemplary enzyme SEQ ID NO:988—can be substituted for 25% of the Kraft pulp contained in these two pulp blends. FIG. 40 illustrates the extractive (“pitch”) content (including steryl esters, triglycerides, fatty acids) of pulp of these two blends.

[0905] The exemplary enzyme SEQ ID NO:988 is tolerant to acidic (reductive) bleaching, and in fact, greater strength gains are witnessed when it is added during a mock bleaching stage.

[0906] Bleach Stage Conditions:

[0907] LA pine TMP pulp

[0908] 4% Solids, pH 6, 70° C.

[0909] 0.2% EDTA, 0.75% Na₂S204

[0910] Enzyme SEQ ID NO:988 added

[0911] 30 min incubation

[0912] Blending Conditions:

[0913] Bleached Craft pulp added to 50:50

[0914] Consistency dropped to 2%

[0915] pH 6, 60° C., 90 min. incubation.

### Basis Weight Reduction

[0916] Handsheets were formed from pulp treated with the exemplary enzyme SEQ ID NO:988 (we aren't treating the handsheets with the enzyme). This experiment was done with the conditions as outlined above, the sheets are 50/50 TMP/Kraft; 1 g of TMP was treated, then 1 g Kraft was added. The enzyme was added once, at 10 ppm after the slurry reaches 70° C. Drainage, handsheet formation, and physical testing was the same for all of the application assays outlined herein.

[0917] 1.8 g handsheets made from lipase-treated pulp had roughly the same tensile strength as untreated 2 g sheets (10% reduction in basis weight), as illustrated in FIG. 41 (the upper line ▪ is the enzyme-treated sample, lower line ♦ is blank). Thus, in some aspects, use of lipases of the invention, e.g., the exemplary enzyme SEQ ID NO:988, allows for a reduction in paper basis weight (“thickness”) by using less pulp per square meter (m2).

[0918] Bleach Stage Conditions:

[0919] LA pine TMP pulp

[0920] Enzyme added at 10 ppm

[0921] 4% cons., pH 6, 70° C.

[0922] 0.2% EDTA, 0.75% Na₂S204

[0923] 30 minute incubation

[0924] Blending Conditions:

[0925] Bleached kraft pulp added to 50:50

[0926] Consistency dropped to 2%

[0927] pH 6, 60° C., 90 min.

[0928] Pitch Deposition

[0929] TMP was treated with the exemplary enzyme SEQ ID NO:988; there appeared to be significantly less lipophilic compounds adhering to enzyme-containing stainless steel beakers, As is demonstrated by the data illustrated in FIG. 42, the amount of triacylglycerides decreased after treatment with the lipase of the invention, while the amount of fatty acids remained unchanged. Similar result was obtained a variety of pulps. Thus, these data illustrate that in some aspects enzyme treatment using a lipase of the invention, e.g., the exemplary enzyme SEQ ID NO:988, can reduce pitch deposition potential, e.g., in industrial equipment.

[0930] Experiment Design:

[0931] Irving TMP, 4% cons.

[0932] 60° C., pH 5, 45 min.

[0933] Five cycles of lipase (SEQ ID NO:988) treatment (fresh pulp each time)

[0934] Solvent extraction of lipophilics (“pitch”) adhered to reaction vessel

[0935] HPLC analysis of extracted pitch composition.

[0936] Expression of Recombinant Enzyme

[0937] The exemplary enzyme SEQ ID NO:988 was expressed as a recombinant protein in a yeast host cell Pichia pastoris, as a fusion protein, with yeast alpha-factor for secretion (see, e.g., Kjeldsen (2000) Appl. Microbiol. Biotechnol. 54(3):277-286); no theoretical glycosylation sites. The secreted protein was approximately 50 kDa, was all soluble with correct folding, and had an approximately 0.2 g/L expression level. Based on these data, it is predicted that Pichia pastoris expression of an enzyme of the invention can be at a TMP mill capacity of about 650-700 ton/day; for 10 ppm dosage, 6.5-7 kg enzyme/day/mill.

[0938] As discussed above, the invention provides a variety of host cells for expressing the nucleic acids, expression cassettes and vectors of the invention—including bacteria, yeast, fungi, plant cells, insect cells and mammalian cells as host cells. Exemplary host cells include gram negative bacteria, such as Escherichia coli; gram positive bacteria, such as any Bacillus (e.g., B. cereus or B. subtilis) or Streptomyces, Lactobacillus gasseri, Lactococcus lactis, Lactococcus cremoris. Exemplary host cells also include eukaryotic organisms, e.g., various yeast, such as Saccharomyces sp., including Saccharomyces cerevisiae, Schizosaccharomyces pombe, or Pichia sp., including Pichia pastoiris, and other yeast, e.g., Kluyveromyces lactis, Hansenula polymorpha, Aspergillus niger, and mammalian cells and cell lines and insect cells and cell lines.

[0939] The invention also includes nucleic acids and polypeptides optimized for expression in these organisms and species. The invention also provides methods for optimizing codon usage in all of these cells, codon-altered nucleic acids and polypeptides made by the codon-altered nucleic acids

[0940] Exemplary Pulp Strength Enhancement Application Procedure

[0941] 3 g thermo-mechanical pulp is adjusted to a consistency of 4% solids with 100 mM sodium acetate buffer, pH 5.0. LABOMAT™ beakers are heated to the desired operating temperature (60° C.). Lipase is dosed along with buffer-only negative controls and the samples are incubated for 45 minutes with 30 rpm rotation. Aluminum sulfate is added to each beaker at a concentration of 2% (OWG). The temperature is ramped to 80° C. and held for 45 minutes. The samples are removed at temperature and poured onto a vacuumed filter one at a time. The de-watered pulp samples are each mixed with 6 L diH₂O in the handsheet maker, drained, transferred onto steel plates, and placed into a pneumatic press. After being pressed for 5 minutes at 55 psi, each plate is inserted into a drying ring and allowed to dry overnight at room temperature. The finished paper is cut into nine ½″×4″ strips and force at peak tensile strength measurements are recorded. Used paper samples can homogenized in a coffee grinder for MeCl₂ extraction.

[0942] A number of embodiments of the invention have been described. Nevertheless, it will be understood that various modifications may be made without departing from the spirit and scope of the invention. Accordingly, other embodiments are within the scope of the following claims.

1. An isolated, synthetic or recombinant nucleic acid comprising
(a) a nucleic acid sequence having at least about 51%, 52%, 53%, 54%, 55%, 56%, 57%, 58%, 59%, 60%, 61%, 62%, 63%, 64%, 65%, 66%, 67%, 68%, 69%, 70%, 71%, 72%, 73%, 74%, 75%, 76%, 77%, 78%, 79%, 80%, 81%, 82%, 83%, 84%, 85%, 86%, 87%, 88%, 89%, 90%, 91%, 92%, 93%, 94%, 95%, 96%, 97%, 98% or 99% or 100% (complete) sequence identity to SEQ ID NO:1, SEQ ID NO:3, SEQ ID NO:5, SEQ ID NO:7, SEQ ID NO:9, SEQ ID NO:1, SEQ ID NO:13, SEQ ID NO:15, SEQ ID NO:17, SEQ ID NO:19, SEQ ID NO:21, SEQ ID NO:23, SEQ ID NO:25, SEQ ID NO:27, SEQ ID NO:29, SEQ ID NO:31, SEQ ID NO:33, SEQ ID NO:35, SEQ ID NO:37, SEQ ID NO:39, SEQ ID NO:41, SEQ ID NO:43, SEQ ID NO:45, SEQ ID NO:47, SEQ ID NO:49, SEQ ID NO:51, SEQ ID NO:53, SEQ ID NO:55, SEQ ID NO:57, SEQ ID NO:59, SEQ ID NO:61, SEQ ID NO:63, SEQ ID NO:65, SEQ ID NO:67, SEQ ID NO:69, SEQ ID NO:71, SEQ ID NO:73, SEQ ID NO:75, SEQ ID NO:77, SEQ ID NO:79, SEQ ID NO:81, SEQ ID NO:83, SEQ ID NO:85, SEQ ID NO:87, SEQ ID NO:89, SEQ ID NO:91, SEQ ID NO:93, SEQ ID NO:95, SEQ ID NO:97, SEQ ID NO:99, SEQ ID NO:101, SEQ ID NO:103, SEQ ID NO:105, SEQ ID NO:107, SEQ ID NO:109, SEQ ID NO:111, SEQ ID NO:113, SEQ ID NO:115, SEQ ID NO:117, SEQ ID NO:119, SEQ ID NO:121, SEQ ID NO: 123, SEQ ID NO:125, SEQ ID NO:127, SEQ ID NO:129, SEQ ID NO:131, SEQ ID NO:133, SEQ ID NO:135, SEQ ID NO:137, SEQ ID NO:139, SEQ ID NO:141, SEQ ID NO: 143, SEQ ID NO:145, SEQ ID NO:147, SEQ ID NO:149, SEQ ID NO:151, SEQ ID NO:153, SEQ ID NO:155, SEQ ID NO:157, SEQ ID NO:159, SEQ ID NO:161, SEQ ID NO:163, SEQ ID NO:165, SEQ ID NO:167, SEQ ID NO:169, SEQ ID NO:171, SEQ ID NO: 173, SEQ ID NO:175, SEQ ID NO:177, SEQ ID NO:179, SEQ ID NO:181, SEQ ID NO:183, SEQ ID NO:185, SEQ ID NO:187, SEQ ID NO:189, SEQ ID NO:191, SEQ ID NO:193, SEQ ID NO:195, SEQ ID NO:197, SEQ ID NO:199, SEQ ID NO:201, SEQ ID NO:203, SEQ ID NO:205, SEQ ID NO:207, SEQ ID NO:209, SEQ ID NO:211, SEQ ID NO:213, SEQ ID NO:215, SEQ ID NO:217, SEQ ID NO:219, SEQ ID NO:221, SEQ ID NO:223, SEQ ID NO:225, SEQ ID NO:227, SEQ ID NO:229, SEQ ID NO:231, SEQ ID NO:233, SEQ ID NO:235, SEQ ID NO:237, SEQ ID NO:239, SEQ ID NO:241, SEQ ID NO:243, SEQ ID NO:245, SEQ ID NO:247, SEQ ID NO:249, SEQ ID NO:251, SEQ ID NO:253, SEQ ID NO:255, SEQ ID NO:257, SEQ ID NO:259, SEQ ID NO:261, SEQ ID NO:263, SEQ ID NO:265, SEQ ID NO:267, SEQ ID NO:269, SEQ ID NO:271, SEQ ID NO:273, SEQ ID NO:275, SEQ ID NO:277, SEQ ID NO:279, SEQ ID NO:281, SEQ ID NO:283, SEQ ID NO:285, SEQ ID NO:287, SEQ ID NO:289, SEQ ID NO:291, SEQ ID NO:293, SEQ ID NO:295, SEQ ID NO:297, SEQ ID NO:299, SEQ ID NO:301, SEQ ID NO:303, SEQ ID NO:305, SEQ ID NO:307, SEQ ID NO:309, SEQ ID NO:311, SEQ ID NO:313, SEQ ID NO:315, SEQ ID NO:317, SEQ ID NO:319, SEQ ID NO:321, SEQ ID NO:323, SEQ ID NO:325, SEQ ID NO:327, SEQ ID NO:329, SEQ ID NO:331, SEQ ID NO:333, SEQ ID NO:335, SEQ ID NO:337, SEQ ID NO:339, SEQ ID NO:341, SEQ ID NO:343, SEQ ID NO:345, SEQ ID NO:347, SEQ ID NO:349, SEQ ID NO:351, SEQ ID NO:353, SEQ ID NO:355, SEQ ID NO:357, SEQ ID NO:359, SEQ ID NO:361, SEQ ID NO:363, SEQ ID NO:365, SEQ ID NO:367, SEQ ID NO:369, SEQ ID NO:371, SEQ ID NO:373, SEQ ID NO:375, SEQ ID NO:377, SEQ ID NO:379, SEQ ID NO:381, SEQ ID NO:383, SEQ ID NO:385, SEQ ID NO:387, SEQ ID NO:389, SEQ ID NO:391, SEQ ID NO:393, SEQ ID NO:395, SEQ ID NO:397, SEQ ID NO:399, SEQ ID NO:401, SEQ ID NO:403, SEQ ID NO:405, SEQ ID NO:407, SEQ ID NO:409, SEQ ID NO:411, SEQ ID NO:413, SEQ ID NO:415, SEQ ID NO:417, SEQ ID NO:419, SEQ ID NO:421, SEQ ID NO:423, SEQ ID NO:425, SEQ ID NO:427, SEQ ID NO:429, SEQ ID NO:431, SEQ ID NO:433, SEQ ID NO:435, SEQ ID NO:437, SEQ ID NO:439, SEQ ID NO:441, SEQ ID NO:443, SEQ ID NO:445, SEQ ID NO:447, SEQ ID NO:449, SEQ ID NO:451, SEQ ID NO:453, SEQ ID NO:455, SEQ ID NO:457, SEQ ID NO:459, SEQ ID NO:461, SEQ ID NO:463, SEQ ID NO:465, SEQ ID NO:467, SEQ ID NO:469, SEQ ID NO:471, SEQ ID NO:473, SEQ ID NO:475, SEQ ID NO:477, SEQ ID NO:479, SEQ ID NO:481, SEQ ID NO:483, SEQ ID NO:485, SEQ ID NO:487, SEQ ID NO:489, SEQ ID NO:491, SEQ ID NO:493, SEQ ID NO:495, SEQ ID NO:497, SEQ ID NO:499, SEQ ID NO:501, SEQ ID NO:503, SEQ ID NO:505, SEQ ID NO:507, SEQ ID NO:509, SEQ ID NO:511, SEQ ID NO:513, SEQ ID NO:515, SEQ ID NO:517, SEQ ID NO:519, SEQ ID NO:521, SEQ ID NO:523, SEQ ID NO:525, SEQ ID NO:527, SEQ ID NO:529, SEQ ID NO:531, SEQ ID NO:533, SEQ ID NO:535, SEQ ID NO:537, SEQ ID NO:539, SEQ ID NO:541, SEQ ID NO:543, SEQ ID NO:545, SEQ ID NO:547, SEQ ID NO:549, SEQ ID NO:551, SEQ ID NO:553, SEQ ID NO:555, SEQ ID NO:557, SEQ ID NO:559, SEQ ID NO:561, SEQ ID N0.563, SEQ ID NO:565, SEQ ID NO:567, SEQ ID NO:569, SEQ ID NO:571, SEQ ID NO:573, SEQ ID NO:575, SEQ ID NO:577, SEQ ID NO:579, SEQ ID NO:581, SEQ ID NO:583, SEQ ID NO:585, SEQ ID NO:587, SEQ ID NO:589, SEQ ID NO:591, SEQ ID NO:593, SEQ ID NO:595, SEQ ID NO:597, SEQ ID NO:599, SEQ ID NO:601, SEQ ID NO:603, SEQ ID NO:605, SEQ ID NO:607, SEQ ID NO.609, SEQ ID NO:611, SEQ ID NO:613, SEQ ID NO:615, SEQ ID NO:617, SEQ ID NO:619, SEQ ID NO:621, SEQ ID NO:623, SEQ ID NO:625, SEQ ID NO:627, SEQ ID NO:629, SEQ ID NO:631, SEQ ID NO:633, SEQ ID NO:635, SEQ ID NO:637, SEQ ID NO:639, SEQ ID NO:641, SEQ ID NO:643, SEQ ID NO:645, SEQ ID NO:647, SEQ ID NO:649, SEQ ID NO:651, SEQ ID NO:653, SEQ ID NO:655, SEQ ID NO:657, SEQ ID NO:659, SEQ ID NO:661, SEQ ID NO:663, SEQ ID NO:665, SEQ ID NO:667, SEQ ID NO:669, SEQ ID NO:671, SEQ ID NO:673, SEQ ID NO:675, SEQ ID NO:677, SEQ ID NO:679, SEQ ID NO:681, SEQ ID NO:683, SEQ ID NO:685, SEQ ID NO:687, SEQ ID NO:689, SEQ ID NO:691, SEQ ID NO:693, SEQ ID NO:695, SEQ ID NO:697, SEQ ID NO:699, SEQ ID NO:701, SEQ ID NO:703, SEQ ID NO:705, SEQ ID NO:707, SEQ ID NO:709, SEQ ID NO:711, SEQ ID NO:713, SEQ ID NO:715, SEQ ID NO:717, SEQ ID NO:719, SEQ ID NO:721, SEQ ID NO:723, SEQ ID NO:725, SEQ ID NO:727, SEQ ID NO:729, SEQ ID NO:731, SEQ ID NO:733, SEQ ID NO:735, SEQ ID NO:737, SEQ ID NO:739, SEQ ID NO:741, SEQ ID NO:743, SEQ ID NO:745, SEQ ID NO:747, SEQ ID NO:749, SEQ ID NO:751, SEQ ID NO:753, SEQ ID NO:755, SEQ ID NO:757, SEQ ID NO:759, SEQ ID NO:761, SEQ ID NO:763, SEQ ID NO:765, SEQ ID NO:767, SEQ ID NO.769, SEQ ID NO:771, SEQ ID NO:773, SEQ ID NO:775, SEQ ID NO:777, SEQ ID NO:779, SEQ ID NO:781, SEQ ID NO:783, SEQ ID NO:785, SEQ ID NO:787, SEQ ID NO:789, SEQ ID NO:791, SEQ ID NO:793, SEQ ID NO:795, SEQ ID NO:797, SEQ ID NO:799, SEQ ID NO:801, SEQ ID NO:803, SEQ ID NO:805, SEQ ID NO:807, SEQ ID NO:809, SEQ ID NO:811, SEQ ID NO:813, SEQ ID NO:815, SEQ ID NO:817, SEQ ID NO:819, SEQ ID NO:821, SEQ ID NO:823, SEQ ID NO:825, SEQ ID NO:827, SEQ ID NO:829, SEQ ID NO:831, SEQ ID NO:833, SEQ ID NO:835, SEQ ID NO:837, SEQ ID NO:839, SEQ ID NO:841, SEQ ID NO:843, SEQ ID NO:845, SEQ ID NO:847, SEQ ID NO:849, SEQ ID NO:851, SEQ ID NO:853, SEQ ID NO:855, SEQ ID NO:857, SEQ ID NO:859, SEQ ID NO:861, SEQ ID NO:863, SEQ ID NO:865, SEQ ID NO:867, SEQ ID NO:869, SEQ ID NO:871, SEQ ID NO:873, SEQ ID NO:875, SEQ ID NO:877, SEQ ID NO:879, SEQ ID NO:881, SEQ ID NO:883, SEQ ID NO:885, SEQ ID NO:887, SEQ ID NO:889, SEQ ID NO:891, SEQ ID NO:893, SEQ ID NO:895, SEQ ID NO:897, SEQ ID NO:899, SEQ ID NO:901, SEQ ID NO:903, SEQ ID NO:905, SEQ ID NO:907, SEQ ID NO:909, SEQ ID NO:911, SEQ ID NO:913, SEQ ID NO:915, SEQ ID NO:917, SEQ ID NO:919, SEQ ID NO:921, SEQ ID NO:923, SEQ ID NO:925, SEQ ID NO:927, SEQ ID NO:929, SEQ ID NO:931, SEQ ID NO:933, SEQ ID NO:935, SEQ ID NO:937, SEQ ID NO:939, SEQ ID NO:941, SEQ ID NO:943, SEQ ID NO:945, SEQ ID NO:947, SEQ ID NO:949, SEQ ID NO:951, SEQ ID NO:953, SEQ ID NO:955, SEQ ID NO:957, SEQ ID NO:959, SEQ ID NO:961, SEQ ID NO:963, SEQ ID NO:965, SEQ ID NO:967, SEQ ID NO:969, SEQ ID NO:971, SEQ ID NO:973, SEQ ID NO:975, SEQ ID NO:977, SEQ ID NO:979, SEQ ID NO:981, SEQ ID NO:983, SEQ ID NO:985, SEQ ID NO:987, SEQ ID NO:989 or SEQ ID NO:991, over a region of at least about 50, 75, 100, 150, 200, 250, 300, 350, 400, 450, 500, 550, 600, 650, 700, 750, 800, 850, 900, 950, 1000, 1050, 1100, 1150 or more residues,
wherein the nucleic acid encodes at least one polypeptide having a hydrolase activity, or encodes a polypeptide or peptide capable of generating an antibody that binds specifically to a polypeptide having a sequence comprising any of the even numbered SEQ ID NO:s in the sequence listing, including from SEQ ID NO:2 through SEQ ID NO:992,
and optionally the sequence identities are determined by analysis with a sequence comparison algorithm or by a visual inspection;
(b) a nucleic acid sequence that hybridizes under stringent conditions to a nucleic acid comprising SEQ ID NO:1, SEQ ID NO:3, SEQ ID NO:5, SEQ ID NO:7, SEQ ID NO:9, SEQ ID NO:1, SEQ ID NO:13, SEQ ID NO:15, SEQ ID NO:17, SEQ ID NO:19, SEQ ID NO:21, SEQ ID NO:23, SEQ ID NO:25, and all nucleic acids disclosed in the SEQ ID listing, which include all odd numbered SEQ ID NO:s from SEQ ID NO:1 through SEQ ID NO:991,
wherein the nucleic acid encodes at least one polypeptide having a hydrolase activity, or encodes a polypeptide or peptide capable of generating an antibody that binds specifically to a polypeptide having a sequence comprising any of the even numbered SEQ ID NO:s in the sequence listing, including from SEQ ID NO:2 through SEQ ID NO:992;
and the stringent conditions include a wash step comprising a wash in 0.2×SSC at a temperature of about 65° C. for about 15 minutes,
and optionally the nucleic acid is at least about 20, 30, 40, 50, 60, 75, 100, 150, 200, 300, 400, 500, 600, 700, 800, 900, 1000 or more residues in length or the full length of the gene or transcript;
(c) a nucleic acid sequence encoding a polypeptide having the amino acid sequence of any one of the even numbered SEQ ID NO:s in the sequence listing from SEQ ID NO:2 through SEQ ID NO:992;
(d) the nucleic acid sequence of (a), wherein the sequence comparison algorithm is a BLAST version 2.2.2 algorithm where a filtering setting is set to blastall-p blasts-d “nr pataa”-F F, and all other options are set to default;
(e) the nucleic acid sequence of any of (a) to (d), wherein nucleic acid encodes a polypeptide having a hydrolase activity comprising a lipase activity, a protease activity, an esterase activity or a phospholipase activity;
(f) the nucleic acid sequence of any of (a) to (e), wherein the hydrolase or lipase activity comprises hydrolyzing a triacylglycerol to a diacylglycerol and a free fatty acid, or, hydrolyzing a triacylglycerol to a monoacylglycerol and free fatty acids, or, hydrolyzing a diacylglycerol to a monoacylglycerol and free fatty acids, or, hydrolyzing a monoacylglycerol to a free fatty acid and a glycerol, or, comprises hydrolyzing a triacylglycerol (TAG), a diacylglycerol (DAG) or a monoacylglycerol (MAG), or the lipase activity comprises synthesizing a tryacylglycerol from a diacylglycerol or a monoacylglycerol and free fatty acids, or the lipase activity comprises synthesizing 1,3-dipalmitoyl-2-oleoylglycerol (POP), 1,3-distearoyl-2-oleoylglycerol (SOS), 1-palmitoyl-2-oleoyl-3-stearoyl glycerol (POS) or 1-oleoyl-2,3-dimyristoylglycerol (OMM), long chain polyunsaturated fatty acids, arachidonic acid, docosahexaenoic acid (DHA) or eicosapentaenoic acid (EPA), or the lipase activity is triacylglycerol (TAG), diacylglycerol (DAG) or monoacylglycerol (MAG) position-specific, or the lipase activity is Sn2-specific, Sn1- or Sn3-specific, or the lipase activity is fatty acid specific, or the lipase activity comprises modifying oils by hydrolysis, alcoholysis, esterification, transesterification or interesterification, or a lipase activity that is regio-specific or chemoselective, or a lipase activity comprising synthesis of an enantiomerically pure chiral product, or a lipase activity comprising synthesis of umbelliferyl fatty acid (FA) esters;
(g) the nucleic acid sequence of any of (a) to (f), wherein the hydrolase activity is thermostable or thermotolerant;
(h) a nucleic acid sequence completely complementary to any of (a) to (g).

2-26. (canceled)

27. A nucleic acid probe for identifying a nucleic acid encoding a polypeptide having a hydrolase activity, wherein the probe comprises
(a) a nucleic acid of claim 1; or
(b) the probe of (a), wherein the probe comprises an oligonucleotide comprising at least about 10 to 50, about 20 to 60, about 30 to 70, about 40 to 80, about 60 to 100, or about 50 to 150 consecutive bases.

28. (canceled)

29. An amplification primer pair for amplifying a nucleic acid encoding a polypeptide having a hydrolase activity, wherein the amplification primer pair comprises:
(a) a nucleic acid sequence capable of amplifying a nucleic acid comprising the sequence of claim 1; or
(b) the amplification primer pair of (a), wherein each member of the amplification primer pair comprises an oligonucleotide comprising at least about 10 to 50 consecutive bases of the sequence.

30. (canceled)

31. A method of amplifying a nucleic acid encoding a polypeptide having a hydrolase activity comprising amplification of a template nucleic acid with an amplification primer sequence pair capable of amplifying a nucleic acid sequence as set forth in claim 1.

32. An expression cassette, vector or cloning vehicle comprising
(a) a nucleic acid comprising the sequence of claim 1;
(b) the expression cassette, vector or cloning vehicle of (a), wherein the expression cassette, vector or cloning vehicle comprises or is a viral vector, a plasmid, a phage, a phagemid, a cosmid, a fosmid, a bacteriophage or an artificial chromosome;
(c) the expression cassette, vector or cloning vehicle of (b), wherein the viral vector comprises an adenovirus vector, a retroviral vector or an adeno-associated viral vector, or artificial chromosome is a bacterial artificial chromosome (BAC), a plasmid, a bacteriophage Pl -derived vector (PAC), a yeast artificial chromosome (YAC), or a mammalian artificial chromosome (MAC);
(d) the expression cassette, vector or cloning vehicle of any of (a) to (c), wherein the nucleic acid is operably linked to a promoter;
(e) the expression cassette, vector or cloning vehicle of (d), wherein the promoter is a plant promoter, an inducible promoter or a constitutive promoter;
(f) the expression cassette, vector or cloning vehicle of any of (a) to (e), further comprising a plant expression vector;
(g) the expression cassette, vector or cloning vehicle of (f), wherein the plant expression vector comprises a plant virus;
(h) the expression cassette, vector or cloning vehicle of (e), wherein the plant promoter comprises a potato promoter, a rice promoter, a corn promoter, a wheat or a barley promoter;
(i) the expression cassette, vector or cloning vehicle of (d), wherein the promoter comprises a promoter derived from T-DNA of Agrobacterium tumefaciens, or a constitutive promoter comprising or derived from CaMV35S, or is an inducible promoter or a tissue-specific promoter; or
(j) the expression cassette, vector or cloning vehicle of (i), wherein the tissue-specific promoter is a seed-specific, a leaf-specific, a root-specific, a stem-specific or an abscission-induced promoter.

33-36. (canceled)

37. A transformed cell comprising: (a) a nucleic acid comprising the sequence of claim 1; (b) the expression cassette, vector or cloning vehicle of claim 32; or (c) the transformed cell of (a) or (b), wherein the cell is a bacterial cell, a mammalian cell, a fungal cell, a yeast cell, an insect cell or a plant cell; or (d) the transformed cell of (c), wherein the plant cell is a potato, rice, corn, wheat, tobacco or barley cell.

38-39. (canceled)

40. A transgenic non-human animal comprising: (a) the sequence of claim 1; or (b) the transgenic non-human animal of (a), wherein the animal is a mouse.

41. (canceled)

42. A transgenic plant comprising: (a) the sequence of claim 1; or (b) the transgenic plant of (a), wherein the plant is a corn plant, a sorghum plant, a potato plant, a tomato plant, a wheat plant, an oilseed plant, a rapeseed plant, a soybean plant, a rice plant, a barley plant, a grass, or a tobacco plant.

43. (canceled)

44. A transgenic seed comprising: (a) the sequence of claim 1; or (b) the transgenic seed of (a), wherein the seed is rice, a corn seed, a wheat kernel, an oilseed, a rapeseed, a soybean seed, a palm kernel, a sunflower seed, a sesame seed, a rice, a barley, a peanut or a tobacco plant seed.

45-51. (canceled)

52. An isolated, synthetic or recombinant polypeptide comprising:
(i) an amino acid sequence having at least 50%, 51%, 52%, 53%, 54%, 55%, 56%, 57%, 58%, 59%, 60%, 61%, 62%, 63%, 64%, 65%, 66%, 67%, 68%, 69%, 70%, 71%, 72%, 73%, 74%, 75%, 76%, 77%, 78%, 79%, 80%, 81%, 82%, 83%, 84%, 85%, 86%, 87%, 88%, 89%, 90%, 91%, 92%, 93%, 94%, 95%, 96%, 97%, 98% or 99% or more, or has 100% (complete), sequence identity to SEQ ID NO:2, SEQ ID NO:4, SEQ ID NO:6, SEQ ID NO:8, SEQ ID NO: 10, SEQ ID NO:12, SEQ ID NO:14, SEQ ID NO:16, SEQ ID NO:18, SEQ ID NO:20, SEQ ID NO:22, SEQ ID NO:24, SEQ ID NO:26, SEQ ID NO:28, SEQ ID NO:30, SEQ ID NO:32, SEQ ID NO:34, SEQ ID NO:36, SEQ ID NO:38, SEQ ID NO:40, SEQ ID NO:42, SEQ ID NO:44, SEQ ID NO:46, SEQ ID NO:48, SEQ ID NO:50, SEQ ID NO:52, SEQ ID NO:54, SEQ ID NO:56, SEQ ID NO:58, SEQ ID NO:60, SEQ ID NO:62, SEQ ID NO:64, SEQ ID NO:66, SEQ ID NO:68, SEQ ID NO:70, SEQ ID NO:72, SEQ ID NO:74, SEQ ID NO:76, SEQ ID NO.78, SEQ ID NO:80, SEQ ID NO:82, SEQ ID NO:84, SEQ ID NO:86, SEQ ID NO:88, SEQ ID NO:90, SEQ ID NO:92, SEQ ID NO:94, SEQ ID NO:96, SEQ ID NO:98, SEQ ID NO:100, SEQ ID NO:102, SEQ ID NO:104, SEQ ID NO:106, SEQ ID NO:108, SEQ ID NO:110, SEQ ID NO:112, SEQ ID NO:114, SEQ ID NO:116, SEQ ID NO:118, SEQ ID NO:120, SEQ ID NO:122, SEQ ID NO:124, SEQ ID NO:126, SEQ ID NO:128, SEQ ID NO:130, SEQ ID NO:132, SEQ ID NO:134, SEQ ID NO:136, SEQ ID NO:138, SEQ ID NO:140, SEQ ID NO:142, SEQ ID NO:143, SEQ ID NO:146, SEQ ID NO:148, SEQ ID NO:150, SEQ ID NO:152, SEQ ID NO:154, SEQ ID NO:156, SEQ ID NO:158, SEQ ID NO:160, SEQ ID NO:162, SEQ ID NO:164, SEQ ID NO:166, SEQ ID NO:168, SEQ ID NO:170, SEQ ID NO:172, SEQ ID NO:174, SEQ ID NO:176, SEQ ID NO:178, SEQ ID NO:180, SEQ ID NO:182, SEQ ID NO:184, SEQ ID NO:186, SEQ ID NO:188, SEQ ID NO:190, SEQ ID NO:192, SEQ ID NO:194, SEQ ID NO:196, SEQ ID NO:198, SEQ ID NO:200, SEQ ID NO:202, SEQ ID NO:204, SEQ ID NO:206, SEQ ID NO:208, SEQ ID NO:210, SEQ ID NO:212, SEQ ID NO:214, SEQ ID NO:216, SEQ ID NO:218, SEQ ID NO:220, SEQ ID NO:222, SEQ ID NO:224, SEQ ID NO:226, SEQ ID NO:228, SEQ ID NO:230, SEQ ID NO:232, SEQ ID NO:234, SEQ ID NO:236, SEQ ID NO:238, SEQ ID NO:240, SEQ ID NO:242, SEQ ID NO:244, SEQ ID NO:246, SEQ ID NO:248, SEQ ID NO:250, SEQ ID NO:252, SEQ ID NO:254, SEQ ID NO:256, SEQ ID NO:258, SEQ ID NO:260, SEQ ID NO:262, SEQ ID NO:264, SEQ ID NO:266, SEQ ID NO:268, SEQ ID NO:270, SEQ ID NO:272, SEQ ID NO:274, SEQ ID NO:276, SEQ ID NO:278, SEQ ID NO:280, SEQ ID NO:282, SEQ ID NO:284, SEQ ID NO:286, SEQ ID NO:288, SEQ ID NO:290, SEQ ID NO.292, SEQ ID NO:294, SEQ ID NO:296, SEQ ID NO:298, SEQ ID NO:300; SEQ ID NO:302, SEQ ID NO:304, SEQ ID NO:306, SEQ ID NO:308, SEQ ID NO:310, SEQ ID NO:312, SEQ ID NO:314, SEQ ID NO:316, SEQ ID NO:318, SEQ ID NO:320, SEQ ID NO:322, SEQ ID NO:324, SEQ ID NO:326, SEQ ID NO:328, SEQ ID NO:330, SEQ ID NO:332, SEQ ID NO:334, SEQ ID NO:336, SEQ ID NO:338, SEQ ID NO:340, SEQ ID NO:342, SEQ ID NO:344, SEQ ID NO:346, SEQ ID NO:348, SEQ ID NO:350, SEQ ID NO:352, SEQ ID NO:354, SEQ ID NO:356, SEQ ID NO:358, SEQ ID NO:360, SEQ ID NO:362, SEQ ID NO:364, SEQ ID NO:366, SEQ ID NO:368, SEQ ID NO:370, SEQ ID NO:372, SEQ ID NO:374, SEQ ID NO:376, SEQ ID NO:378, SEQ ID NO:380, SEQ ID NO:382, SEQ ID NO:384, SEQ ID NO:386, SEQ ID NO:388, SEQ ID NO:390, SEQ ID NO:392, SEQ ID NO:394, SEQ ID NO:396, SEQ ID NO:398, SEQ ID NO:400, SEQ ID NO:402, SEQ ID NO:404, SEQ ID NO:406, SEQ ID NO:408, SEQ ID NO:410, SEQ ID NO:412, SEQ ID NO:414, SEQ ID NO:416, SEQ ID NO:418, SEQ ID NO:420, SEQ ID NO:422, SEQ ID NO:424, SEQ ID NO:426, SEQ ID NO:428, SEQ ID NO:430, SEQ ID NO:432, SEQ ID NO:434, SEQ ID NO:436, SEQ ID NO:438, SEQ ID NO:440, SEQ ID NO:442, SEQ ID NO:444, SEQ ID NO:446, SEQ ID NO:448, SEQ ID NO:450, SEQ ID NO:452, SEQ ID NO:454, SEQ ID NO:456, SEQ ID NO:458, SEQ ID NO:460, SEQ ID NO:462, SEQ ID NO:464, SEQ ID NO:466, SEQ ID NO:468, SEQ ID NO:470, SEQ ID NO:472, SEQ ID NO:474, SEQ ID NO:476, SEQ ID NO:478, SEQ ID NO:480, SEQ ID NO:482, SEQ ID NO:484, SEQ ID NO:486, SEQ ID NO:488, SEQ ID NO:490, SEQ ID NO:492, SEQ ID NO:494, SEQ ID NO:496, SEQ ID NO:498, SEQ ID NO:500, SEQ ID NO:502, SEQ ID NO:504, SEQ ID NO:506, SEQ ID NO:508, SEQ ID NO:510, SEQ ID NO:512, SEQ ID NO:514, SEQ ID NO:516, SEQ ID NO:518, SEQ ID NO:520, SEQ ID NO:522, SEQ ID NO:524, SEQ ID NO:526, SEQ ID NO:528, SEQ ID NO:530, SEQ ID NO:532, SEQ ID NO:534, SEQ ID NO:536, SEQ ID NO:538, SEQ ID NO:540, SEQ ID NO:542, SEQ ID NO:544, SEQ ID NO:546, SEQ ID NO:548, SEQ ID NO:550, SEQ ID NO:552, SEQ ID NO:554, SEQ ID NO:556, SEQ ID NO.558, SEQ ID NO:560, SEQ ID NO:562, SEQ ID NO:564, SEQ ID NO:566, SEQ ID NO:568, SEQ ID NO:570, SEQ ID NO.572, SEQ ID NO:574, SEQ ID NO:576, SEQ ID NO:578, SEQ ID NO:580, SEQ ID NO:582, SEQ ID NO:584, SEQ ID NO:586, SEQ ID NO:588, SEQ ID NO:590, SEQ ID NO:592, SEQ ID NO:594, SEQ ID NO:596, SEQ ID NO:598, SEQ ID NO:600, SEQ ID NO:602, SEQ ID NO:604, SEQ ID NO:606, SEQ ID NO:608, SEQ ID NO:610, SEQ ID NO:612, SEQ ID NO:614, SEQ ID NO:616, SEQ ID NO:618, SEQ ID NO:620, SEQ ID NO:622, SEQ ID NO:624, SEQ ID NO:626, SEQ ID NO:628, SEQ ID NO:630, SEQ ID NO:632, SEQ ID NO:634, SEQ ID NO:636, SEQ ID NO:638, SEQ ID NO:640, SEQ ID NO:642, SEQ ID NO:644; SEQ ID NO:646, SEQ ID NO:648, SEQ ID NO:650, SEQ ID NO:652, SEQ ID NO:654, SEQ ID NO:656, SEQ ID NO:658, SEQ ID NO:660, SEQ ID NO:662, SEQ ID NO:664, SEQ ID NO:666, SEQ ID NO:668, SEQ ID NO:670, SEQ ID NO:672, SEQ ID NO:674, SEQ ID NO:676, SEQ ID NO:678, SEQ ID NO:680, SEQ ID NO:682, SEQ ID NO:684, SEQ ID NO:686, SEQ ID NO:688, SEQ ID NO:690, SEQ ID NO:692, SEQ ID NO:694, SEQ ID NO:696, SEQ ID NO:698, SEQ ID NO:700, SEQ ID NO:702, SEQ ID NO:704, SEQ ID NO:706, SEQ ID NO:708, SEQ ID NO:710, SEQ ID NO:712, SEQ ID NO:714, SEQ ID NO:716, SEQ ID NO:718, SEQ ID NO:720, SEQ ID NO:722, SEQ ID NO:724, SEQ ID NO:726, SEQ ID NO:728, SEQ ID NO:730, SEQ ID NO:732, SEQ ID NO:734, SEQ ID NO:736, SEQ ID NO:738, SEQ ID NO:740, SEQ ID NO:742, SEQ ID NO:744, SEQ ID NO:746, SEQ ID NO:748, SEQ ID NO:750, SEQ ID NO:752, SEQ ID NO:754, SEQ ID NO:756, SEQ ID NO:758, SEQ ID NO:760, SEQ ID NO:762, SEQ ID NO:764, SEQ ID NO:766, SEQ ID NO:768, SEQ ID NO:770, SEQ ID NO:772, SEQ ID NO:774, SEQ ID NO:776, SEQ ID NO.778, SEQ ID NO:780, SEQ ID NO:782, SEQ ID NO:784, SEQ ID NO:786, SEQ ID NO:788, SEQ ID NO:790, SEQ ID NO:792, SEQ ID NO:794, SEQ ID NO:796, SEQ ID NO:798, SEQ ID NO:800, SEQ ID NO:802, SEQ ID NO:804, SEQ ID NO:808, SEQ ID NO:808, SEQ ID NO:810, SEQ ID NO:812, SEQ ID NO:814, SEQ ID NO:816, SEQ ID NO:818, SEQ ID NO:820, SEQ ID NO:822, SEQ ID NO:824, SEQ ID NO:826, SEQ ID NO:828, SEQ ID NO:830, SEQ ID NO:832, SEQ ID NO:834, SEQ ID NO:836, SEQ ID NO:838, SEQ ID NO:840, SEQ ID NO:842, SEQ ID NO:844, SEQ ID NO:846, SEQ ID NO:848, SEQ ID NO:850, SEQ ID NO:852, SEQ ID NO:854, SEQ ID NO:856, SEQ ID NO:858, SEQ ID NO:860, SEQ ID NO:862, SEQ ID NO:864, SEQ ID NO:866, SEQ ID NO:868, SEQ ID NO:870, SEQ ID NO:872, SEQ ID NO:874, SEQ ID NO:876, SEQ ID NO:878, SEQ ID NO:880, SEQ ID NO:882, SEQ ID NO:884, SEQ ID NO:886, SEQ ID NO:888, SEQ ID NO:890, SEQ ID NO:892, SEQ ID NO:894, SEQ ID NO:896, SEQ ID NO:898, SEQ ID NO:900, SEQ ID NO:902, SEQ ID NO:904, SEQ ID NO:906, SEQ ID NO:908, SEQ ID NO:910, SEQ ID NO:912, SEQ ID NO:914, SEQ ID NO:916, SEQ ID NO:918, SEQ ID NO:920, SEQ ID NO:922, SEQ ID NO:924, SEQ ID NO:926, SEQ ID NO:928, SEQ ID NO:930, SEQ ID NO:932, SEQ ID NO:934, SEQ ID NO:936, SEQ ID NO:938, SEQ ID NO:940, SEQ ID NO:942, SEQ ID NO:944, SEQ ID NO:946, SEQ ID NO:948, SEQ ID NO:950, SEQ ID NO:952, SEQ ID NO:954, SEQ ID NO:956, SEQ ID NO:958, SEQ ID NO:960, SEQ ID NO:962, SEQ ID NO:964, SEQ ID NO:966, SEQ ID NO:968, SEQ ID NO:970, SEQ ID NO:972, SEQ ID NO:974, SEQ ID NO:976, SEQ ID NO:978, SEQ ID NO:980, SEQ ID NO:982, SEQ ID NO:984, SEQ ID NO:986, SEQ ID NO:988, SEQ ID NO:990 or SEQ ID NO:992, over a region of at least about 20, 30, 40, 50, 75, 100, 150, 200, 250, 300, 10 350, 400, 450, 500, 550, 600, 650, 700 or more residues, or over the full length of the polypeptide;
(ii) the polypeptide of (i), wherein the amino acid sequence identities are determined by analysis with a sequence comparison algorithm or by a visual inspection;
(ii) an amino acid sequence encoded by the nucleic acid of claim 1 of claim 22;
(iii) the polypeptide of (i) or (ii), wherein the hydrolase activity comprises an esterase activity, a lipase activity, a phospholipase activity or a protease activity;
(iv) the polypeptide of any of (i) to (iii), wherein the hydrolase or lipase activity comprises hydrolyzing a triacylglycerol to a diacylglycerol and a free fatty acid, or, hydrolyzing a triacylglycerol to a monoacylglycerol and free fatty acids, or, hydrolyzing a diacylglycerol to a monoacylglycerol and free fatty acids, or, hydrolyzing a monoacylglycerol to a free fatty acid and a glycerol, or, comprises hydrolyzing a triacylglycerol (TAG), a diacylglycerol (DAG) or a monoacylglycerol (MAG); or the hydrolase or lipase activity comprises synthesizing a tryacylglycerol from a diacylglycerol or a monoacylglycerol and free fatty acids; or the lipase activity comprises synthesizing 1,3-dipalmitoyl-2-oleoylglycerol (POP), 1,3-distearoyl-2-oleoylglycerol (SOS), 1-palmitoyl-2-oleoyl-3-stearoylglycerol (POS) or 1-oleoyl-2,3-dimyristoylglycerol (OMM), long chain polyunsaturated fatty acids, arachidonic acid, docosahexaenoic acid (DHA) or eicosapentaenoic acid (EPA); or the hydrolase or lipase activity is triacylglycerol (TAG), diacylglycerol (DAG) or monoacylglycerol (MAG) position-specific; or the lipase activity is Sn2-specific, Sn1- or Sn3-specific; or the hydrolase or lipase activity is fatty acid specific; of the hydrolase or lipase activity comprises modifying oils by hydrolysis, alcoholysis, esterification, transesterification or interesterification; or the hydrolase or lipase activity comprises synthesis of umbelliferyl fatty acid (FA) esters;
(v) the polypeptide of any of (i) to (iv), wherein the hydrolase activity is regio-specific or chemoselective; or comprises synthesis of enantiomerically pure chiral products;
(vi) the polypeptide of any of (i) to (v), wherein the hydrolase activity is thermostable or thermotolerant;
(vii) the polypeptide of any of (i) to (vi), wherein the polypeptide lacks a signal sequence;
(viii) the polypeptide of any of (i) to (vii), wherein the polypeptide further comprises a heterologous sequence;
(ix) the polypeptide of any of (viii), wherein the heterologous sequence comprises or consists of a heterologous signal sequence, a heterologous hydrolase or non-hydrolase signal sequence, a hydrolase active site or a substrate binding site;
(x) the polypeptide of any of (i) to (ix), wherein the polypeptide comprises at least one glycosylation site, or at least one N-linked glycosylation site; or
(xi) the polypeptide of any of (i) to (x), wherein the polypeptide retains a hydrolase activity under conditions comprising about pH 6.5, pH 6.0, pH 5.5, 5.0, pH 4.5 or 4.0; or, retains a hydrolase activity under conditions comprising about pH 8.0, pH 8.5, pH 9, pH 9.5, pH 10 or pH 10.5.

53-81. (canceled)

82. A composition comprising the polypeptide of claim 52, wherein the protein preparation comprises a liquid, a solid or a gel.

83-102. (canceled)

103. A method of producing a recombinant polypeptide comprising
(i)(a) providing a nucleic acid operably linked to a promoter, wherein the nucleic acid comprises the sequence of claim 1; and (b) expressing the nucleic acid of step (a) under conditions that allow expression of the polypeptide, thereby producing a recombinant polypeptide; or
(ii) the method of (a), further comprising transforming a host cell with the nucleic acid of step (a) followed by expressing the nucleic acid of step (a), thereby producing a recombinant polypeptide in a transformed cell.

104-128. (canceled)

129. A method of generating a variant of a nucleic acid encoding a polypeptide with a hydrolase activity comprising:
(i) (a) providing a template nucleic acid comprising the sequence of claim 1; and
(b) modifying, deleting or adding one or more nucleotides in the template sequence, or a combination thereof, to generate a variant of the template nucleic acid;
(ii) the method of (i), further comprising expressing the variant nucleic acid to generate a variant hydrolase polypeptide;
(iii) the method of (i) or (ii), wherein the modifications, additions or deletions are introduced by a method comprising error-prone PCR, shuffling, oligonucleotide-directed mutagenesis, assembly PCR, sexual PCR mutagenesis, in vivo mutagenesis, cassette mutagenesis, recursive ensemble mutagenesis, exponential ensemble mutagenesis, site-specific mutagenesis, gene reassembly, gene site saturated mutagenesis (GSSM), synthetic ligation reassembly (SLR) and a combination thereof;
(iv) the method of (i) or (ii), wherein the modifications, additions or deletions are introduced by a method comprising recombination, recursive sequence recombination, phosphothioate-modified DNA mutagenesis, uracil-containing template mutagenesis, gapped duplex mutagenesis, point mismatch repair mutagenesis, repair-deficient host strain mutagenesis, chemical mutagenesis, radiogenic mutagenesis, deletion mutagenesis, restriction-selection mutagenesis, restriction-purification mutagenesis, artificial gene synthesis, ensemble mutagenesis, chimeric nucleic acid multimer creation and a combination thereof;
(v) the method of any of (i) to (iv), wherein the method is iteratively repeated until a variant hydrolase having an altered or different activity or an altered or different stability from that of a polypeptide encoded by the template nucleic acid is produced;
(vi) the method of (v), wherein the variant hydrolase is thermotolerant, and retains some activity after being exposed to an elevated temperature, or the variant hydrolase has increased glycosylation as compared to the hydrolase encoded by a template nucleic acid, or the variant hydrolase has a hydrolase activity under a high temperature, wherein the hydrolase encoded by the template nucleic acid is not active under the high temperature;
(vii) the method of any of (i) to (vi), wherein the method is iteratively repeated until a hydrolase coding sequence having an altered codon usage from that of the template nucleic acid is produced; or
(viii) the method of any of (i) to (vii), wherein the method is iteratively repeated until a hydrolase gene having higher or lower level of message expression or stability from that of the template nucleic acid is produced.

130-139. (canceled)

140. A method for modifying codons in a nucleic acid encoding a hydrolase polypeptide, the method comprising:
(a) providing a nucleic acid encoding a polypeptide with a hydrolase activity comprising the sequence of claim 1; and,
(b) identifying a codon in the nucleic acid of step (a) and replacing it with a different codon encoding the same amino acid as the replaced codon, thereby modifying codons in a nucleic acid encoding a hydrolase.

141-159. (canceled)

160. A method for hydrolyzing a triacylglycerol (TAG), a diacyl glycerol (DAG) or a monoacylglycerol (MAG) comprising:
(a) providing a polypeptide having a hydrolase activity, wherein the polypeptide comprises the polypeptide of claim 52, or a polypeptide encoded by the nucleic acid of claim 1;
(b) providing a composition comprising a triacylglycerol (TAG), a diacylglycerol (DAG) or a monoacylglycerol (MAG); and
(c) contacting the polypeptide of step (a) with the composition of step (b) under conditions wherein the polypeptide hydrolyzes the triacylglycerol (TAG), diacylglycerol (DAG) or monoacylglycerol (MAG).

161. A method for removing or decreasing the amount of a triacylglycerol (TAG), a diacylglycerol (DAG) or a monoacylglycerol (MAG) from a composition comprising:
(a) providing a polypeptide having a hydrolase activity, wherein the polypeptide comprises the polypeptide of claim 52, or a polypeptide encoded by the nucleic acid of claim 1;
(b) providing a composition comprising a triacylglycerol (TAG), a diacylglycerol (DAG) or a monoacylglycerol (MAG); and
(c) contacting the polypeptide of step (a) with the composition of step (b) under conditions wherein the polypeptide removes or decreases the amount of the triacylglycerol (TAG), diacylglycerol (DAG) or monoacylglycerol (MAG).

162. A method of increasing thermotolerance or thermostability of a hydrolase polypeptide, the method comprising
(a) glycosylating a hydrolase polypeptide, wherein the polypeptide comprises at least thirty contiguous amino acids of the polypeptide of claim 52, or a polypeptide encoded by the nucleic acid of claim 1, thereby increasing the thermotolerance or thermostability of the hydrolase polypeptide; or
(b) the method of (a), wherein the hydrolase specific activity is thermostable or thermotolerant at a temperature in the range from greater than about 37° C. to about 95° C.

163. (canceled)

164. A method for overexpressing a recombinant hydrolase polypeptide in a cell comprising expressing a vector comprising the nucleic acid of sequence claim 1, wherein overexpression is effected by use of a high activity promoter, a dicistronic vector or by gene amplification of the vector.

165-167. (canceled)

168. A method for washing an object comprising:
(a) providing a composition comprising a polypeptide having a hydrolase activity, wherein the polypeptide comprises the polypeptide of claim 52, or a polypeptide encoded by the nucleic acid of claim 1;
(b) providing an object; and
(c) contacting the polypeptide of step (a) and the object of step (b) under conditions wherein the composition can wash the object.

169. A method for hydrolyzing an oil in a feed or a food prior to consumption by an animal comprising:
(a) obtaining a feed material comprising an oil, wherein the oil can be hydrolyzed by a polypeptide having a hydrolase activity, wherein the polypeptide comprises the polypeptide of claim 52, or a polypeptide encoded by the nucleic acid of claim 1; and
(b) adding the polypeptide of step (a) to the feed or food material in an amount sufficient for a sufficient time period to cause hydrolysis of the oil and formation of a treated food or feed, thereby hydrolyzing the oil in the food or the feed prior to consumption by the animal; or
(c) the method of (a) or (b), wherein the food or feed comprises rice, corn, barley, wheat, legumes, or potato.

170. (canceled)

171. A feed or a food comprising (i) a polypeptide of claim 52, (ii) a polypeptide encoded by the nucleic acid of claim 1, (iii) the feed, food, feed supplement, food supplement or dietary composition of (i) or (ii), further comprising a nutritional base comprising a fat;
(iv) the feed, food, feed supplement, food supplement or dietary composition of (i), (ii), or (iii) wherein the hydrolase is activated by a bile salt;
(v) the feed, food, feed supplement, food supplement or dietary composition of any of (i) to (iv), further comprising a cow's milk-based infant formula;
(vi) the feed, food, feed supplement, food supplement or dietary composition of any of (i) to (v), wherein the hydrolase can hydrolyze long chain fatty acids.

172-190. (canceled)

191. A chimeric protein comprising a first domain comprising
(a) a signal sequence comprising (i) a peptide having a subsequence of the polypeptide of claim 52; or (ii) consisting of a peptide having a subsequence of the polypeptide of claim 52 and at least a second domain;
(b) a polypeptide of claim 52 and at least a second domain;
(c) the chimeric protein of (a) or (b), wherein the protein is a fusion protein; or
(d) the chimeric protein of (a), (b) or (c), wherein the second domain comprises an enzyme, or a hydrolase.

192-194. (canceled)

195. A method for biocatalytic synthesis of a structured lipid comprising:
(i) (a) providing the polypeptide of claim 52;
(b) providing a composition comprising a triacylglyceride (TAG);
(c) contacting the polypeptide of step (a) with the composition of step (b) under conditions wherein the polypeptide hydrolyzes an acyl residue at the Sn2 position of the triacylglyceride (TAG), thereby producing a 1,3-diacylglyceride (DAG);
(d) providing an R1 ester;
(e) providing an R1-specific hydrolase, and
(f) contacting the 1,3-DAG of step (c) with the R1 ester of step (d) and the R1-specific hydrolase of step (e) under conditions wherein the R1-specific hydrolase catalyzes esterification of the Sn2 position, thereby producing the structured lipid;
(ii) the method of (i), wherein the hydrolase is an Sn2-specific lipase;
(iii) the method of (i) or (ii), wherein the structured lipid comprises a cocoa butter alternative (CBA), a synthetic cocoa butter, a natural cocoa butter, 1,3-dipalmitoyl-2-oleoylglycerol (POP), 1,3-distearoyl-2-oleoylglycerol (SOS), 1-palmitoyl-2-oleoyl-3-stearoylglycerol (POS) or 1-oleoyl-2,3-dimyristoylglycerol (OMM);
(iv) the method of any of (i) to (iii), wherein the composition of step (b) comprises a fluorogenic fatty acid (FA), or the composition of step (b) comprises an umbelliferyl FA ester;
(v) the method of any of (i) to (iv), wherein the end product is enantiomerically pure; or
(vi) the method of any of (i) to (v), wherein the hydrolase is immobilized.

196-197. (canceled)

198. A method for biocatalytic synthesis of a structured lipid comprising:
(i) (a) providing the polypeptide of claim 52;
(b) providing a composition comprising a triacylglyceride (TAG);
(c) contacting the polypeptide of step (a) with the composition of step (b) under conditions wherein the polypeptide hydrolyzes an acyl residue at the Sn1 or Sn3 position of the triacylglyceride (TAG), thereby producing a 1,2-DAG or 2,3-DAG; and
(d) promoting of acyl migration in the 1,2-DAG or 2,3-DAG of the step (c) under kinetically controlled conditions, thereby producing a 1,3-DAG;
(ii) the method of (i), further comprising providing an R1 ester, and polypeptide is an R1-specific lipase, and contacting the 1,3-DAG of step (d) with the R1 ester and the R1-specific lipase under conditions wherein the R1-specific lipase catalyzes esterification of the Sn2 position, thereby producing a structured lipid;
(iii) the method of (i) or (ii), wherein the polypeptide has lipase activity and is an Sn1 or an Sn3-specific lipase;
(iv) the method of any of (i) to (iii), wherein the structured lipid comprises a cocoa butter alternative (CBA), a synthetic cocoa butter, a natural cocoa butter, 1,3-dipalmitoyl-2-oleoylglycerol (POP), 1,3-distearoyl-2-oleoylglycerol (SOS), 1-palmitoyl-2-oleoyl-3-stearoylglycerol (POS) or 1-oleoyl-2,3-dimyristoylglycerol (OMM);
(v) the method of any of (i) to (iv), wherein step (d) further comprises using ion exchange resins;
(vi) the method of any of (i) to (v), wherein the kinetically controlled conditions comprise non-equilibrium conditions resulting in production of an end product having greater than a 2:1 ratio of 1,3-DAG to 2,3-DAG;
(vii) the method of any of (i) to (vi), wherein the composition of step (b) comprises a fluorogenic fatty acid (FA), or the composition of step (b) comprises an umbelliferyl FA ester;
(viii) the method of any of (i) to (vii), wherein the end product is enantiomerically pure; or
(ix) the method of any of (i) to (viii), wherein the hydrolase is immobilized.

199-206. (canceled)

207. A method for preparation of an optical isomer of a propionic acid from a racemic ester of the propionic acid comprising:
(i) (a) providing the polypeptide having a hydrolase activity of claim 52, wherein the hydrolase is stereoselective for an optical isomer of the propionic acid;
(b) providing racemic esters;
(c) contacting the polypeptide of step (a) with the racemic esters of step (b) wherein the polypeptide can selectively catalyze the hydrolysis of the esters of step (b), thereby producing the optical isomer of the propionic acids
(ii) the method of (i), wherein the optical isomer of the propionic acid comprises S(+) of 2-(6-methoxy-2-naphthyl) propionic acid and the racemic esters comprises racemic (R,S) esters of 2-(6-methoxy-2-naphthyl) propionic acid; or
(iii) the method of (i) or (ii), wherein the hydrolase is immobilized.

208. (canceled)

209. A method for stereoselective hydrolyzing racemic mixtures of esters of 2-substituted acids comprising:
(i) (a) providing a hydrolase claim 52, wherein the hydrolase is stereoselective, or the hydrolase is immobilized;
(b) providing a composition comprising a racemic mixture of esters of 2-substituted acids; and
(c) contacting the polypeptide of step (a) with the composition of step (b) under conditions wherein the polypeptide of step (b) can selectively hydrolyze the esters; or
(ii) the method of (i), wherein the 2-substituted acid comprises a 2-aryloxy substituted acid, an R-2-(4-hydroxyphenoxy)propionic acid or a 2-arylpropionic acid, or the 2-substituted acid comprises a ketoprofen.

210-212. (canceled)

213. A method for oil or fat modification comprising:
(i) (a) providing a hydrolase claim 52;
(b) providing an oil or fat, and
(c) contacting the hydrolase of step (a) with the oil or fat of step (b) under conditions wherein the hydrolase can modify the oil or fat;
(ii) the method of (i), wherein the modification comprises a hydrolase-catalyzed hydrolysis of the fat or oil;
(iii) the method of (ii), wherein the hydrolysis is a complete or a partial hydrolysis of the fat or oil;
(iv) the method of any of (i) to (iii), wherein the oil comprises a glycerol ester of a polyunsaturated fatty acid, or a fish, animal, or vegetable oil; or
(v) the method of (iv), wherein the vegetable oil comprises an olive, canola, sunflower, palm, soy or lauric oil or rice bran oil.

214-217. (canceled)

218. A method for hydrolysis of polyunsaturated fatty acid (PUFA) esters comprising:
(a) providing a hydrolase claim 52;
(b) providing composition comprising a polyunsaturated fatty acid ester, and
(c) contacting the hydrolase with the composition of step (b) under conditions wherein the hydrolase can hydrolyze the polyunsaturated fatty acid (PUFA) ester.

219. A method of selective hydrolysis of polyunsaturated fatty acids esters over saturated fatty acid esters comprising:
(a) providing a hydrolase claim 52, wherein the hydrolase has a lipase activity and selectively hydrolyzes polyunsaturated fatty acid (PUFA) esters;
(b) providing a composition comprising a mixture of polyunsaturated and saturated esters; and
(c) contacting the polypeptide of step (a) with the composition of step (b) under conditions wherein the polypeptide can selectively catalyze the hydrolysis of polyunsaturated fatty acids esters.

220. A method for preparing a food or a feed additive comprising polyunsaturated fatty acids (PUFA) comprising:
(a) providing a hydrolase claim 52, wherein the hydrolase selectively hydrolyzes polyunsaturated fatty acid (PUFA) esters;
(b) providing a composition comprising a PUFA ester; and
(c) contacting the polypeptide of step (a) with the composition of step (b) under conditions wherein the polypeptide can selectively catalyze the hydrolysis of polyunsaturated fatty acid esters thereby producing the PUFA-containing food or feed additive.

221. A method for treatment of latex comprising:
(i) (a) providing a hydrolase claim 52, wherein the polypeptide has selectivity for a saturated ester over an unsaturated ester, thereby converting the saturated ester to its corresponding acid and alcohol;
(b) providing a latex composition comprising saturated and unsaturated esters;
(c) contacting the hydrolase of step (a) with the composition of step (b) under conditions wherein the polypeptide can selectively hydrolyze saturated esters, thereby treating the latex;
(ii) the method of (i), wherein ethyl propionate is selectively hydrolyzed over ethyl acrylate;
(iii) the method of (i) or (ii), wherein the latex composition of step (b) comprises: polymers containing acrylic, vinyl and unsaturated acid monomers, alkyl acrylate monomers, methyl acrylate, ethyl acrylate, propyl acrylate and butyl acrylate, acrylate acids, acrylic acid, methacrylic acid, crotonic acid, itaconic acid and mixtures thereof, or, the latex composition is a hair fixative; or
(iv) the method of any of (i) to (iii), wherein the conditions of step (c) comprise a pH in the range from about pH 4 to pH 8 and a temperature in the range from about 200 to about 50° C.

222-225. (canceled)

226. A method for refining a lubricant comprising:
(i) (a) providing a composition comprising a hydrolase claim 52; (b) providing a lubricant; and (c) treating the lubricant with the hydrolase under conditions wherein the hydrolase can selective hydrolyze oils in the lubricant, thereby refining it or (ii) the method of (i), wherein the lubricant is a hydraulic oil.

227. (canceled)

228. A method of treating a fabric comprising:
(i) (a) providing a composition comprising a hydrolase claim 52, wherein the hydrolase can selectively hydrolyze carboxylic esters; (b) providing a fabric; and (c) treating the fabric with the hydrolase under condition wherein the hydrolase can selectively hydrolyze carboxylic esters thereby treating the fabric;
(ii) the method of (i), wherein treatment of the fabric comprises improvement of the hand and drape of the final fabric, dyeing, obtaining flame retardancy, obtaining water repellency, obtaining optical brightness, or obtaining resin finishing; or
(iii) the method of (i) or (ii), wherein the fabric comprises cotton, viscose, rayon, lyocell, flax, linen, ramie, all blends thereof, or blends thereof with polyesters, wool, polyamides acrylics or polyacrylics.

229-230. (canceled)

231. A fabric, yarn or fiber comprising
(i) a polypeptide having a hydrolase activity as set forth in claim 52;
(ii) the fabric, yarn or fiber of (i), wherein the hydrolase is adsorbed, absorbed or immobilized on the surface of the fabric, yarn or fiber.

232. (canceled)

233. A method for removing or decreasing the amount of a food or oil stain comprising
(i) contacting a polypeptide having a hydrolase activity as set forth in claim 52 with the food or oil stain under conditions wherein the hydrolase can hydrolyze oil or fat in the stain;
(ii) the method of (i), wherein the hydrolase has an enhanced stability to denaturation by surfactants and to heat deactivation; or
(ii) the method of (i), wherein the hydrolase is a detergent or a laundry solution.

234-240. (canceled)

241. A method of reducing fat content in milk or vegetable-based dietary compositions comprising: (a) providing a composition comprising a polypeptide having a hydrolase activity as set forth in claim 52; (b) providing a composition comprising a milk or a vegetable oil, and (c) treating the composition of step (b) with the hydrolase under conditions wherein the hydrolase can hydrolyze the oil or fat in the composition, thereby reducing its fat content.

242. (canceled)

243. A method of catalyzing an interesterification reaction to produce new triglycerides comprising:
(i) (a) providing a composition comprising a polypeptide having a hydrolase activity as set forth in claim 52, wherein the hydrolase can catalyze an interesterification reaction;
(b) providing a mixture of triglycerides and free fatty acids; (c) treating the composition of step (b) with the hydrolase under conditions wherein the hydrolase can catalyze exchange of free fatty acids with the acyl groups of triglycerides, thereby producing new triglycerides enriched in the added fatty acids; or
(ii) the method of (i), wherein the hydrolase is an Sn1,3-specific lipase.

244. (canceled)

245. A transesterification method for preparing a margarine oil having a low trans-acid and a low intermediate chain fatty acid content, comprising:
(a) providing a transesterification reaction mixture comprising a stearic acid source material selected from the group consisting of stearic acid, stearic acid monoesters of low molecular weight monohydric alcohols and mixtures thereof,
(b) providing a liquid vegetable oil;
(c) providing a polypeptide having a hydrolase activity as set forth in claim 52, wherein the polypeptide comprises a 1,3-specific lipase activity;
(d) transesterifying the stearic acid source material and the vegetable oil triglyceride, to substantially equilibrate the ester groups in the 1-, 3-positions of the glyceride component with non-glyceride fatty acid components of the reaction mixture,
(e) separating transesterified free fatty acid components from glyceride components of the transesterification mixture to provide a transesterified margarine oil product and a fatty acid mixture comprising fatty acids, fatty acid monoesters or mixtures thereof released from the vegetable oil, and
(f) hydrogenating the fatty acid mixture.

246. A method for making a composition comprising 1-palmitoyl-3-stearoyl-2-monoleine (POSt) and 1,3-distearoyl-2-monoleine (StOSt) comprising providing a polypeptide having a hydrolase or lipase activity as set forth in claim 52, wherein the hydrolase or lipase is capable of 1,3-specific lipase-catalyzed interesterification of 1,3-dipalmitoyl-2-monoleine (POP) with stearic acid or tristearin, to make a product enriched in the 1-palmitoyl-3-stearoyl-2-monoleine (POSt) or 1,3-distearoyl-2-monoleine (StOSt).

247. A method for ameliorating or preventing lipopolysaccharide (LPS)-mediated toxicity comprising administering to a patient a pharmaceutical composition comprising the polypeptide of claim 52, or a polypeptide encoded by the nucleic acid of claim 1.

248. A method for detoxifying an endotoxin comprising contacting the endotoxin with the polypeptide of claim 52, or a polypeptide encoded by the nucleic acid of as set forth in claim 1.

249. A method for deacylating a 2′ or a 3′ fatty acid chain from a lipid A comprising contacting the lipid A with the polypeptide of claim 52, or a polypeptide encoded by the nucleic acid of claim 1.

250. A method for hydrolyzing a composition comprising a cellulose or a lipophilic compound, comprising;
(i) (a) providing a polypeptide having a hydrolase activity as set forth in claim 52, or a polypeptide having a hydrolase activity encoded by the nucleic acid of claim 1;
(b) contacting the cellulose or a lipophilic compound with the polypeptide having hydrolase activity under conditions wherein the polypeptide is enzymatically active;
(ii) the method of claim (i), wherein the polypeptide has lipase activity;
(iii) the polypeptide has a sequence as set forth in SEQ ID NO:988, SEQ ID NO:986, SEQ ID NO:604, SEQ ID NO:92 or SEQ ID NO:48;
(iv) the method of any of (i) to (iii), wherein the lipase activity comprises the ability to hydrolyze both sterol esters and triglycerides, thereby generating sterols, glycerol and/or free fatty acids,
(v) the method of any of (i) to (iv), wherein the cellulose or lipophilic compound comprises a pulp, a paper, a paper product, a wood, a wood product, or a paper or wood waste product;
(vi) the method of any of (i) to (v), wherein the hydrolysis of the cellulose improves inter-fiber bonding of cellulose fibers; or
(vii) the method of any of (i) to (vi), wherein the method comprises a paper-making process, and the inter-fiber bonding of cellulose fibers generated by the hydrolysis of the cellulose results in a stronger paper.

251-255. (canceled)

256. A method for making paper comprising:
(i) (a) providing a polypeptide having a hydrolase activity as set forth in claim 52, or a polypeptide having a hydrolase activity encoded by the nucleic acid of claim 1;
(b) providing a compound comprising a cellulose; and
(c) contacting the compound with the polypeptide having hydrolase activity under conditions wherein the polypeptide is enzymatically active;
(ii) the method of claim (i), wherein the method further comprises a bleaching step;
(iii) the method of (ii), wherein the bleaching step comprises use (addition) of a chloroperoxidase enzyme; or
(iv) the method of any of (i) to (iii), wherein the cellulose or lipophilic compound comprises a pulp, a paper, a paper product, a wood, a wood product, or a paper or wood waste product.

257. A composition comprising:
(i) a cellulose or a lipophilic compound, wherein the compound comprises a recombinant polypeptide having a hydrolase activity as set forth in claim 52, or the recombinant polypeptide is encoded by the nucleic acid of claim 1;
(ii) the composition of (i), wherein the polypeptide has lipase activity, or the polypeptide has a sequence as set forth in SEQ ID NO:988, SEQ ID NO:986, SEQ ID NO:604, SEQ ID NO:92 or SEQ ID NO:48;
(iii) the composition of (i) or (ii), wherein the lipase activity comprises the ability to hydrolyze both sterol esters and triglycerides, thereby generating sterols, glycerol and/or free fatty acids; or
(iv) the composition of (iii), wherein the cellulose or lipophilic compound comprises a pulp, a kraft pulp, a paper, a paper product, a wood, a wood product, or a paper or wood waste product.

258-260. (canceled)

261. A method for generating a sterol, a glycerol or a free fatty acid by hydrolyzing a composition comprising a cellulose or a lipophilic compound, comprising:
(i) (a) providing a polypeptide having hydrolase activity as set forth in claim 52, or a polypeptide having hydrolase activity encoded by the nucleic acid of claim 1, and a composition comprising a cellulose or a lipophilic compound;
(b) contacting the composition with the polypeptide having hydrolase activity under conditions wherein the polypeptide is enzymatically active, thereby generating a sterol, a glycerol or a free fatty acid; or
(ii) the method of (i), wherein the polypeptide has lipase activity, or the polypeptide has a sequence as set forth in SEQ ID NO:988, SEQ ID NO:986, SEQ ID NO:604, SEQ ID NO:92 or SEQ ID NO:48.

262. (canceled)

263. A method for decreasing the amount of lipophilic extract (“pitch”) in a compound comprising a cellulose comprising:
(i) (a) providing a polypeptide having a hydrolase activity as set forth in claim 52, or a polypeptide having a hydrolase activity encoded by the nucleic acid of claim 1;
(b) providing a compound comprising a cellulose, and
(c) contacting the compound with the polypeptide having hydrolase activity under conditions wherein the polypeptide is enzymatically active;
(ii) the method of (i), wherein a chloroperoxidase enzyme is also added
(iii) the method of (i) or (ii), wherein the lipophilic extract comprises a cellulose or a lipophilic compound comprising a pulp, a paper, a paper product, a wood, a wood product, or a paper or wood waste product;
(iv) the method of any of (i) to (iii), wherein the compound comprises a pulp; or
(v) the method of any of (i) to (iv, wherein the pulp comprises a kraft pulp or a thermomechanical pulp (TMP).

The application's sequence listing, which the Patent Office published only in electronic form, follows.

SEQUENCE LISTING (992 sequences)

SEQ ID NO: 1 - DNA, 924 bp, Unknown
  Obtained from an environmental sample.
atgctggcgcatcctgaggcgggagctcaacccgtcagcttgggaggtgttcttgcgcgaggtgagtctacgcagttgcgtgatgcgcgctgggaggcccaaaccggtgcgcagggcttatggcggccaatggactttctcacacagggcaaggccggcatttattttctcgagccttatgatgcgagacgtattcctgtcttattggtgcacggcataaacggcacccccggcaattttgccgcgatggcggatcatcttgataaaaagcgctttcaactatgggcggcagcctatccgtcaggtttggccatagagggttcagcccggatactgagtcgtttgctgcaagagctgcaagtgcgttatcgcttcaagcagatgattgtggtggcccacagtatgggtggactggtgaccagatccatgctgctggatctggccgcatcgggatcatcgatcaaagtgcggcaagtgtttaccctggcaacaccatggacaggcgatgatcgtgccgccatgggggtacggcatgcgccggcggtgatcagaagctggcgggacatggcttccggcagcgacttcctgcagggcctgtttcacttgccatccggcgcggagcgatcatggcccgccggcgcccggcactatctcttgtttgcctacgaccgggcggacagttggtcggcggagtccagcgactccgtcatcccgctgcgcagtcagttgggtgaagcagcgcaacgtcaggcttatcagctgcgtggatacaatgccacacatgtgggcattctcaacgacgcagctgtctggcgcgatctgaatggctggatggcggagacgccggccgaggccgctcaacctaccagcttgcggcggaatacccagttccgctcatccgaggctgtcggttcaaagcgataa

SEQ ID NO: 2 - protein, 307 aa, Unknown
  Obtained from an environmental sample.
MLAHPEAGAQPVSLGGVLARGESTQLRDARWEAQTGAQGLWRPMDFLTQGKAGIYFLEPYDARRIPVLLVHGINGTPGNFAAMADHLDKKRFQLWAAAYPSGLAIEGSARILSRLLQELQVRYRFKQMIVVAHSMGGLVTRSMLLDLAASGSSIKVRQVFTLATPWTGDDRAAMGVRHAPAVIRSWRDMASGSDFLQGLFHLPSGAERSWPAGARHYLLFAYDRADSWSAESSDSVIPLRSQLGEAAQRQAYQLRGYNATHVGILNDAAVWRDLNGWMAETPAEAAQPTSLRRNTQFRSSEAVGSKR

SEQ ID NO: 3 - DNA, 942 bp, Unknown
  Obtained from an environmental sample.
ttgaaaagattactcatttatattgctctttcgcttctgtcattgtcgtcatgggcaggaaatatcacacaaacgaacgtaaatagcatagggtatacgcaaacgaagtacccaattgtacttgttcacggcttgtttggtttcgatacgttagccggtgttgactatttttatggcatacctcaatcactaacgcaaagtggtgccaaagtctatgtggcacaagtgtcggcggcgaacagcaccgagctaagaggggagcagttactggtacaagtggaaaatgtactggctgtgacaggtgcagaaaaagtgaacctcattggtcatagtcatggaggcccgaccgcaaggtatgttgcctctgttgctccacagttagtggcatcggtcaccagcattggcggtgtgaataagggctcggcagtggctgatcttgcgcgtggtacagttccggaaggttcgatttctgaagcaatcgcggtgaaactagcagaggggctaaccttattgattggcttactttctggtggaatggatcttgagcaagacgtgttagcctctcttgatgcattaaccacagagggagcactcaactttaatacccattatcctgaaggagtaccgacaacggcctgcggagacggtgaatggcaagtaaatggtgtgcactattactcatggacaggaacgtcaacctttaccaatctgctcgatccgattgacggtgctatggtgctattggggttggcttttgatgagccgaacgatggtttagttggccaatgcagcactcatttgggcaaggttattcgagacgattataaaatgaatcatctggatgaaataaatggcatgttaggtattcaccatttatttgaaacggatccggtgacgttatatcgacaacatgccaatcgattgaaactacaaggcttataa

SEQ ID NO: 4 - protein, 313 aa, Unknown
  Obtained from an environmental sample.
MKRLLIYIALSLLSLSSWAGNITQTNVNSIGYTQTKYPIVLVHGLFGFDTLAGVDYFYGIPQSLTQSGAKVYVAQVSAANSTELRGEQLLVQVENVLAVTGAEKVNLIGHSHGGPTARYVASVAPQLVASVTSIGGVNKGSAVADLARGTVPEGSISEAIAVKLAEGLTLLIGLLSGGMDLEQDVLASLDALTTEGALNFNTHYPEGVPTTACGDGEWQVNGVHYYSWTGTSTFTNLLDPIDGAMVLLGLAFDEPNDGLVGQCSTHLGKVIRDDYKMNHLDEINGMLGIHHLFETDPVTLYRQHANRLKLQGL

SEQ ID NO: 5 - DNA, 957 bp, Unknown
  Obtained from an environmental sample.
atgagcattctcacggagtttcccgagccgctgtatctcggccaacagccgcacttccagggcgtcaacgccaacttcgacgtcgatacggcacgcgccatggcgtgggccgcccagctggcgtacgagaccaatgaccaggcgaaggtcggacgcattctggcggcctggcactggacattgcggggatttcacgccggaagggtcagcagcttcctgcctctgaccagcgcgaaagggctcatcgcggcgcgcgatggcgtcagtatcctgacattcgcggggacagagccgaccgctctggccgactggatcgtcgacttttcaattcatcagaccgccgacggcacccatgagggctttgaacaaggcgtcgactccgtctgggacgacatttcagccatcctgggcgccggcggctcctcggcaacggacaagctcttcatcacaggccacagtcttggcggcgcactcgccgccgtggccgcgcgacgcctggtgaaaagcaacgtcgtcggcctggatcgcattctcggcgtttacacgttcggaatgccgcgcagcggtaacgacctgttcgcccaggactatcgggcgatcggtggtggcgctttggcaaaccgtaccttccgttttgtcgacggcgacgacatcgtcccgcaggttccgccgccggaggcccccttcgactatcgacacgtcggctgctcgctcacctgcgggcatggggcgctgttcgacccgggaaacctcgttgccgatgcccccgagccggtggccgccggagcatccgccgtgctgggcctggcgcagggtcttttccgagcgccgccccttcaggaacacctgccggcatttccgggcgatccgctggctgccatcgtcatcgacaatcttcgcccgccgatccgtgaccacctcatggaccgatacctgcgcgcgctcgcggctctctag

SEQ ID NO: 6 - protein, 318 aa, Unknown
  Obtained from an environmental sample.
MSILTEFPEPLYLGQQPHFQGVNANFDVDTARAMAWAAQLAYETNDQAKVGRILAAWHWTLRGFHAGRVSSFLPLTSAKGLIAARDGVSILTFAGTEPTALADWIVDFSIHQTADGTHEGFEQGVDSVWDDISAILGAGGSSATDKLFITGHSLGGALAAVAARRLVKSNVVGLDRILGVYTFGMPRSGNDLFAQDYRAIGGGALANRTFRFVDGDDIVPQVPPPEAPFDYRHVGCSLTCGHGALFDPGNLVADAPEPVAAGASAVLGLAQGLFRAPPLQEHLPAFPGDPLAAIVIDNLRPPIRDHLMDRYLRALAAL

SEQ ID NO: 7 - DNA, 1245 bp, Unknown
  Obtained from an environmental sample.
atgcaacgcgtttttgcaacgcttacggccgctctttcgctggccacgcttcttgcagcatgcgtactacccgcaactcccgctgaagcagccaataccgaccccatcgttctcgtgcacggcttcgccggcttcggccgcgacgaagcgctgggctacaagtactggggcgggttcgacgacctggaggcgtatctcaacagccagggccgcaccacgaagaccgcggtagtgggtccggtcagctccaactgggaccgcgccgtcgagttgtactaccagatcaagggcgggtgtgtggactacggcgccaatcacgccagccacttcggtcacgaccgcaccgtgccgggcaaatgctttcccggtctgtatccgcaatgggatgccgcgcacccggtgcacttggtgacgcacagcatgggcggacagaccgccaagatgctcgtgcagttgctcgaagccaacggtgcgccgcatgagaccggattgttcggcggcgccaagcacggctgggtgaagagcgtgacggcgatttcctcgccgctcaacggcaccacgctcgcggacgtggtgggcaacgacattccgttcgtgatcgacctggtgggcggcatttcggcgctgaccggtctcagcgaccagaacaacttcgtctacaacttcaagctcgagcagtgggacttgaaacgctacccgggagaaggcttcatcagctatcgcaaccgcgtggtggattccccgatctgggagcacccggttgcccgcaaggacttgagcatctggggcctctctcccgacggcgcggcggaggaaaacgcctgggtgcagacgtggtccaacgtttactacttctccttcgccacgaactccacgtttaccggcatcttcaccggctgggaatatccgactcccaccaccaacccgctcatcgtgccgttcgcttatcccgccgcgtggccgttgaagccgggcatgggcaactacaccaataacacgccgggcgaagtggcgatcgacaagtcctggtggcccaacgacgcggtagtgaacaccaagagcatgaaggcgccatggaacgcgtcgagcgtggcggtgaactggaacggcactgcgcagcgcggcaagtggaactacatgggcctgtcggatggcttcgatcacttcgacatcatcggctggacgctcttctgggacgcgcggtcgttttaccagacgcatgccgaccgtctgcgtgcgctgtga

SEQ ID NO: 8 - protein, 414 aa, Unknown
  Obtained from an environmental sample.
MQRVFATLTAALSLATLLAACVLPATPAEAANTDPIVLVHGFAGFGRDEALGYKYWGGFDDLEAYLNSQGRTTKTAVVGPVSSNWDRAVELYYQIKGGCVDYGANHASHFGHDRTVPGKCFPGLYPQWDAAHPVHLVTHSMGGQTAKMLVQLLEANGAPHETGLFGGAKHGWVKSVTAISSPLNGTTLADVVGNDIPFVIDLVGGISALTGLSDQNNFVYNFKLEQWDLKRYPGEGFISYRNRVVDSPIWEHPVARKDLSIWGLSPDGAAEENAWVQTWSNVYYFSFATNSTFTGIFTGWEYPTPTTNPLIVPFAYPAAWPLKPGMGNYTNNTPGEVAIDKSWWPNDAVVNTKSMKAPWNASSVAVNWNGTAQRGKWNYMGLSDGFDHFDIIGWTLFWDARSFYQTHADRLRAL

SEQ ID NO: 9 - DNA, 705 bp, Unknown
  Obtained from an environmental sample.
atgttcaagaaagcccttccggccgctgccgcggtcgctggtctgctcatttcctcgtcggcgctggccctgctgcccgacactcccggcactgccttcccgtcggtgagcaacttcgccaactccggcccctacagcaccaccagccgcagcgaaggccccaactgccggatctaccgtccgagcaccctgggccagaacggcgtccgtcacccggtcatcctctggggcaacggcaccggcgcctcgccgaccacctacggttcgctgctcagccactgggcgagccatggcttcgtggtcgccgcggcggaaacctccaacgccggttccggccaggaaatgctcgcctgcctgagctacctgcagaccgaggccggtcgcagcagcggcacctacgtcggcaagctgaacctgggccgcgtcggcacctccgggcactcccaaggcggcggcggttcgatcatggccggtcgcgacaaccgcatcctgaccaccgcgccgatgcagccgtacatcctcggcctgggccacgacacctcgtcgcagagccagcagaacggcccgatgttcctgatgtccggcgccagcgacaccctggccggtccgaccctgaaccaggcgccggtctatcgccgcgtcaaccagccggtcttctggggcaccctgcgcggcgccagccacttcgagccggtcggcaacgcc

SEQ ID NO: 10 - protein, 235 aa, Unknown
  Obtained from an environmental sample.
MFKKALPAAAAVAGLLISSSALALLPDTPGTAFPSVSNFANSGPYSTTSRSEGPNCRIYRPSTLGQNGVRHPVILWGNGTGASPTTYGSLLSHWASHGFVVAAAETSNAGSGQEMLACLSYLQTEAGRSSGTYVGKLNLGRVGTSGHSQGGGGSIMAGRDNRILTTAPMQPYILGLGHDTSSQSQQNGPMFLMSGASDTLAGPTLNQAPVYRRVNQPVFWGTLRGASHFEPVGNA

SEQ ID NO: 11 - DNA, 849 bp, Unknown
  Obtained from an environmental sample.
atgttcaacaaagcacttcctgcagcggccgcggtcgccggtctgttcctttccacctcggccatggcgctgctgccggatacgcccggaacccccttcccgtcggtgtccagcttcgaaaggtccggtccctacagcaccaccagccgcagcgaaggccccaactgccggatctatcgaccgagcaacctgggccagaacggcgtccgccacccggtcatcctctggggcaacggcaccggtgccagcccgaccacctaccgcggcctgctcgagcactgggccagccacggcttcgtggtcgccgccgccgagacctccaacgccggctccgggcgcgagatgctcaactgcctgagctacctgcagaccgaagccgggcgcagcagcggcacctacgtcggccggctcaatctcggccgcgtcggcacgtccggccactcgcagggcggtggcggctcgatcatggccgggcgcgacacccggatcaaaaccaccgcgcccatgcagccctacaccctgggcctgggccatgtgagttcctcgcagagccagcagaacggcccgatgttcctgatgtccggcagcctggacaccctggccggcccgaccctgaaccaggcgccggtctatcgccgggccaacgtgccggtgttctggggcaccctgcgcggcgccagccacttcgtgccggtcggcagtgccggcggttaccgtggcccgtccaccgcctggttccgctaccagctgatggacgatacctcggcgcgcagccagttcgtcggcaccaactgcggcctgtgccgcgacttctcctggaccgacatccagcgcaagggcgcgctgtaa

SEQ ID NO: 12 - protein, 282 aa, Unknown
  Obtained from an environmental sample.
MFNKALPAAAAVAGLFLSTSAMALLPDTPGTPFPSVSSFERSGPYSTTSRSEGPNCRIYRPSNLGQNGVRHPVILWGNGTGASPTTYRGLLEHWASHGFVVAAAETSNAGSGREMLNCLSYLQTEAGRSSGTYVGRLNLGRVGTSGHSQGGGGSIMAGRDTRIKTTAPMQPYTLGLGHVSSSQSQQNGPMFLMSGSLDTLAGPTLNQAPVYRRANVPVFWGTLRGASHFVPVGSAGGYRGPSTAWFRYQLMDDTSARSQFVGTNCGLCRDFSWTDIQRKGAL

SEQ ID NO: 13 - DNA, 1689 bp, Unknown
  Obtained from an environmental sample.
atgggattgttcgattacaagaatgccgatggcaaagcgttgtacagcgacgccatcgcactgacgctgtatgcctacacgcccaccggccagccattgccggcaaccgcctgggcaccggtcgctgcgaccgcgctgggttatcaaggcaaggtcgggccgcaaggcacgttcttcggcgagaaggacggtttcaccagcgccgaagccgaagtgctcggcaaatacgacgctgcaggcaagttgatcggcatcggcatcgcgtttcgtggcaccggcggcctgggctacagcgacaccttcggtgacctgaaaaacaatctgctggcggccatcggcccatcggattacgcgagcaattacgcgaaaaacgccttcgacaacctgctcaaggcggtcgccgcattcgcgattgccaatggcattgctgccaaggatgtactgatcagcggccacagcctcggcgggctcggggtcaacagcgtcgccgaactgagcgcgggcaactggggcgggttcttcaaagacgccaactatgttgcgttcgcctcgccgacccagagcagcaccggcaacaacgtgttgaacatcggttacgagaacgatccggtgttccgcgtgctcgatggcaccaccttcagcaccgcctcgatgggcaagcacgacaagccccacgaatcgaccaccgataacatcgtcaacttcaacgaaaactacgcctccaccgcgcagaacctcgtgccgttcagcatcatcaatcccatgagctggtcggcccatagttcgctgggttatgccgatggcctgaaccgggtgatcgattcgaagttctacaacctcaccagcaaggactcgacgatcatcgtttccaacctggaagaggcctcgcgcggtaaaacctgggtcgaggacctcggtcgcagcggcgagccgcacaccggcagcaccttcatcatcggtaccgacagcaacgactggctcaagggcggggcgggcaacgacttcctggaaggacgcggcggcgatgaccgtttccgcgatgacggcggcttcaacattctgctgggcggccaagggcacaacacctttgaactgcagaagccgttgcagaacttcagctttgccaacgacggcgacggcacgctgtatgtgcgcgacgcctatggcggcatcagcatgacccgcgacatcggcgcgctggtgagcaaagaagcgggttcgtggtggggcagcaaggaaatcacctggaacgtcaccgccaagggtctgaccaacggcaacgaactgacccagtacaaccactcactcaacggcgacgcctacggcaatgccctgcacgcgactgccgagggtgactggctgttcggcctgggcggcgacgacaagctgatcagcgacaagggccatgtgaccttcgtcggcggcgctggcaacgacgtgatgacagcggtaggtggcaacaacacgttcctgttcagcggcgcgttcggtttcgatgccatcaacggctatcagggcagcgacaaactggtgttcatgggcgttgaaggcgtggggcagggctacgactacaagcagcacgcgtcgcagtcgggcaacgataccgtgctgaagattggcgactatgccgtgacgctgatcggggttggcgtggctaacctgtcggattcggcattcgtcttcgcctga

SEQ ID NO: 14 - protein, 562 aa, Unknown
  Obtained from an environmental sample.
MGLFDYKNADGKALYSDAIALTLYAYTPTGQPLPATAWAPVAATALGYQGKVGPQGTFFGEKDGFTSAEAEVLGKYDAAGKLIGIGIAFRGTGGLGYSDTFGDLKNNLLAAIGPSDYASNYAKNAFDNLLKAVAAFAIANGIAAKDVLISGHSLGGLGVNSVAELSAGNWGGFFKDANYVAFASPTQSSTGNNVLNIGYENDPVFRVLDGTTFSTASMGKHDKPHESTTDNIVNFNENYASTAQNLVPFSIINPMSWSAHSSLGYADGLNRVIDSKFYNLTSKDSTIIVSNLEEASRGKTWVEDLGRSGEPHTGSTFIIGTDSNDWLKGGAGNDFLEGRGGDDRFRDDGGFNILLGGQGHNTFELQKPLQNFSFANDGDGTLYVRDAYGGISMTRDIGALVSKEAGSWWGSKEITWNVTAKGLTNGNELTQYNHSLNGDAYGNALHATAEGDWLFGLGGDDKLISDKGHVTFVGGAGNDVMTAVGGNNTFLFSGAFGFDAINGYQGSDKLVFMGVEGVGQGYDYKQHASQSGNDTVLKIGDYAVTLIGVGVANLSDSAFVFA

SEQ ID NO: 15 - DNA, 858 bp, Unknown
  Obtained from an environmental sample.
atgaatattgttctagcacacggcattctcggcttcaaaaagattcctatcctgaatctggagtacttcaacggcgtgaaggcgcatctggaagataaatttaatgcgcgggtattggtcacgaaagtcgaccccgtcgcaggtatagaaaaacatggcgaccagttgtacgaacagattacggcggcgctcggccatactgggactgagccgactctcgaccccagcaaaaaggttcacatcatagcccacagcatgggcgggctggatgccaggtaccttctgtcgaagaatgaaaatggcatcgcagattacgtgagtacgctaacgactgtaagcactccgcacacaggatcgcctttggcggattttttctattcggcctttgacggtgagtcaaatattccgattttgggtaccctgatcagcgcagtcgaaaatggcgcccgggaggtgctcgacaatctggatataattgatgggctgagggatttaaccacttcaaacatgagtgagttcaacaaaaattatcaagataacaacagcgtcaagtatttctgtgttgccgggcagggccgtaatgattcattcgcaaaaacctgcattgcgctgctaccaacctatgcttacatcaagacaaagactggatcggaggaagcaaacgatggtttggtaccgatatcttcagcccttcgggagggttgggagaggataggcgagccttggcctttcgatcattttcaggaaatcggacataatctcgaccatggcttggacgtcctgcatcaggaagtttttcatcttggcaagtacgaagaaattgtggaacggttacaggcgcttgagaaggagagctag

SEQ ID NO: 16 - protein, 285 aa, Unknown
  Obtained from an environmental sample.
MNIVLAHGILGFKKIPILNLEYFNGVKAHLEDKFNARVLVTKVDPVAGIEKHGDQLYEQITAALGHTGTEPTLDPSKKVHIIAHSMGGLDARYLLSKNENGIADYVSTLTTVSTPHTGSPLADFFYSAFDGESNIPILGTLISAVENGAREVLDNLDIIDGLRDLTTSNMSEFNKNYQDNNSVKYFCVAGQGRNDSFAKTCIALLPTYAYIKTKTGSEEANDGLVPISSALREGWERIGEPWPFDHFQEIGHNLDHGLDVLHQEVFHLGKYEEIVERLQALEKES

SEQ ID NO: 17 - DNA, 1854 bp, Unknown
  Obtained from an environmental sample.
atgggtgtgtatgactacaagaactacagcacggcggactccaaggcgttgttcagcgacgccatggcaatcacgctgtattcctatcacaacctcgacaacggctttgccgtcggttatcagcacaacggctttggcctcggcttgccggccacgctggtcagcgcgctgatcggcggcaccgattcacaaggggtgattcccggtcttccctggaaccccgattcggaaaaagccgcactggacgccgtgcgcaaggccggctggacgccgatcactgccgcgcaactgggctatgacggcaagaccgacgtgcgtggaaccttcttcggcgaaaaggcgggctacaccagcgcccaggtggaaatcctgggcaagtacgacgccgagggccatctcaccgagatcggcattgcctttcgtggcaccagcgggccacgggaaatcctcatcggtgactccattggcgatgcgatcaacgacttgctcgccgccttcggccccaaggactacgccaagaactacgtcggtgaagcgttcggcagactgatggccgacgtggcggcgttcgccaaggccaacgggctgaccggcaaggatgtactggtcagcggccacagcctgggcgggctggcggtcaacagcatggcggacctgagcggcggcaagtggggcgggttcttcaatgactcgaactacatcgcctacgcctcaccgacccagagcagcaccgataaagtgctcaacgtcggctacgaaaacgatccggtattccgcgccctggacggttcgaccttcaccggcgcctcgcttggcgttcacgatgcgcccaaggcatcggccaccgacaacatcgtcagtttcaacgatcattacgcctcgaacgtgtggaatgtgctgccgttttccatcgtcaacattcccacctggatctcgcacctgcccaccgcgtatggcgacggcatgaaccgggtgatcgagtcgaagttctacgacctcaccagcagggattcgacgatcatcgtcgccaacctctcggatccggcgcgcggcaatacctgggtgcaggatctcaatcgcaacgccgagactcacaagggcagcactttcatcattggcagcgacgccaatgacttgatccagggcggcagcggcaacgattacctggagggccgcgccggcaacgacacgttccgcgacagcggcggttacaacatcattctcggcgggtcgggcagcaataccctggaactgcagaagtcggtgaacagttttgactttgccaacgacggcgccggcaacctgtacatccgcgatgccaagggcgggatcagcatcacccgcgacatcggcagcattgtcaccaaagagccggggttcctgtgggggctgttcaaggacgacgtgacccacagcgtgaccgccagcggcttgaaggtgggcaacaacgtcacgcagtacgagtccagcgtcaaaggcagcgcgggcgccgatacgctcaaggcgggggccggtggcgactggctgttcgggctggagggcaacgatcatctgatcggcgggattggcgacgacgtgtttgtcggcggtgcgggcaatgacctgatggagtccgggggtggggcggatacgttcctgttcagcggcgcgttcggcaatgaccgggtgctgggctacacggcgaacgacaaactggtgttcctcggcgtgcagggcgtgttgcccaacgacgatttccgtgcccatgccacggcggtcgggcaggatacggtgctcaagttcggcgccgattcggtgaccctggtcggggtttcattgagcagcttgaatggcgacgggattgtgatcgcctga

SEQ ID NO: 18 - protein, 617 aa, Unknown
  Obtained from an environmental sample.
MGVYDYKNYSTADSKALFSDAMAITLYSYHNLDNGFAVGYQHNGFGLGLPATLVSALIGGTDSQGVIPGLPWNPDSEKAALDAVRKAGWTPITAAQLGYDGKTDVRGTFFGEKAGYTSAQVEILGKYDAEGHLTEIGIAFRGTSGPREILIGDSIGDAINDLLAAFGPKDYAKNYVGEAFGRLMADVAAFAKANGLTGKDVLVSGHSLGGLAVNSMADLSGGKWGGFFNDSNYIAYASPTQSSTDKVLNVGYENDPVFRALDGSTFTGASLGVHDAPKASATDNIVSFNDHYASNVWNVLPFSIVNIPTWISHLPTAYGDGMNRVIESKFYDLTSRDSTIIVANLSDPARGNTWVQDLNRNAETHKGSTFIIGSDANDLIQGGSGNDYLEGRAGNDTFRDSGGYNIILGGSGSNTLELQKSVNSFDFANDGAGNLYIRDAKGGISITRDIGSIVTKEPGFLWGLFKDDVTHSVTASGLKVGNNVTQYESSVKGSAGADTLKAGAGGDWLFGLEGNDHLIGGIGDDVFVGGAGNDLMESGGGADTFLFSGAFGNDRVLGYTANDKLVFLGVQGVLPNDDFRAHATAVGQDTVLKFGADSVTLVGVSLSSLNGDGIVIA

SEQ ID NO: 19 - DNA, 933 bp, Unknown
  Obtained from an environmental sample.
atgaaacacctgttgtcgcgcagcgcattcgtcctcgccttgctcatgttgccgttcgcatcggccttcgcgtcctccggctacacccaaacccgctatcccatcgtgctggtgcatggcctgttcggctttggccagatgctgggggtggattatttctaccaggtgccggccgcgttgaaggctgacggcgcccaggtatacgtggccgaggtttccgccaccgacagcaacgaggcccgcggcgagcaattgctgcagcaggtgcagaagatcctggccatcaccggcgcgcagaaggtcaacctgatcggccacagccagggcgcgcccaccgcgcgctacgtggccggcgtgcggccggacctggtggcttcggtcaccaccataggcggcgtcaacaagggctccaccgtggccgacatcgtgcgcggcgcggcgcctgcgggcacggtttccgaagcggtggccgccgccatcgccggcgctttggccaaggtgatcgccttcttctccggcaccagcgacctgccgcagcagccgattgccgcgttgaactcgctgaccaccgccggctcgctggccttcaacgccaagtttccggccggcgtgccgcgctcggcttgcggcgaaggcgactaccaggtcaacggcgtgcagtactactcgtggaccggcgcggccaccaccaccaatgtgctggatccgctgaccatcccgatgggcgtgttgggcctggctttcggctccactgcgtccgacggcctggtggcggtgtgctccgcgcacctggggcaggtgatccgcgacgactacaagatgaaccacgtcaacgaaatcaaccagagcttcggcctggtcagcctgttcgaagtcagcccggtcagcctgtaccgccagcaggccaaccgcctgaagaacgcgggcttgtaa

SEQ ID NO: 20 - protein, 310 aa, Unknown
  Obtained from an environmental sample.
MKHLLSRSAFVLALLMLPFASAFASSGYTQTRYPIVLVHGLFGFGQMLGVDYFYQVPAALKADGAQVYVAEVSATDSNEARGEQLLQQVQKILAITGAQKVNLIGHSQGAPTARYVAGVRPDLVASVTTIGGVNKGSTVADIVRGAAPAGTVSEAVAAAIAGALAKVIAFFSGTSDLPQQPIAALNSLTTAGSLAFNAKFPAGVPRSACGEGDYQVNGVQYYSWTGAATTTNVLDPLTIPMGVLGLAFGSTASDGLVAVCSAHLGQVIRDDYKMNHVNEINQSFGLVSLFEVSPVSLYRQQANRLKNAGL

SEQ ID NO: 21 - DNA, 1482 bp, Unknown
  Obtained from an environmental sample.
atgaccttgattacgccaagctcgaaattaaccctcactaaagggaacaaaagctggagctcgcgcgcctgcaggtcgacactagtggatccctacggcatccccgccggcagcacgctggccgatgtcgcgggcggcacgcaggcgcagcccttcgatgtgaccctgtcgaagctcgcgaccgcggtctacggcacccgcggcgctccgccggaaggctggagcgcggtcagcgaccagcagctgcgcgacctcggcgtcgccgacccgaccgcgtggcggcagcagttcctcggcggcggcgagcagaccaaggcgcaggagttcaaggccgaggtctacaccgacggcaacggcaactacgtgctgtcctaccgcggcaccgccgagggctgggacgactggcagaacaacttcaagcagggcaccggcttccagaccgacccggtcgacaagttcagcggcaccgcggtcaacaccgcacgcgagttccagcgcgtgttcggcaacccgcccggcggcggggcgaccaacctggcgatcaccgggcactcgcagggcggcgggctggcgacggtcggctcgctcgcgaccggcgtgccggcggtgaccttcgacgcttcgggcatccatcccaacacgctcgatcgcatgggcctggacccgcaggccgcgcgcgacaccgccgagggcggccagatccgcgcctattcgctgagcagcgacctgctgacgcagacccaggagggcgggccgctgggcctgctcgcgcccgacgcgatgggcaccaagatcgtggtcgatcccgcgcgcgccgacgagcaccacatgatcgaccactacggcgcgatcgagctcgaaggcaagtcgccggaggagctggcgaagctcaacgcgctggtcgaggcggcgcgcaatacgccgtggatcccggccaacccgctgatcggcacgctgaccggcgtcgcgcacgtcggcggcggtaccgtgtattcggcgatgagccacagccccaacgcgttgaccgcggcgatgatcgatcggcagccctggcagaccggctacgagaatccctccgacgccggcaaggcgctgcaggacctggtgccggacgtgctcaaggacgacttcgcgcgcaacacccacgacaccgtccaggacgtcgtcgacgtggtcaacggcgacttcgcccgcggcgactacgtgcagggcggcttcagcatcgccggcgacgtcggcgagggcttctggaactcggtcggcgacaccgccaaccgcggcgccgacgcgctggcgcagaaggtcgacgacggcgtcgacggctgggcgggcgacgtgctctcgggcatcgtccgcggcggcggcgacgtgctgcagggcgcctccgacgcggtcgggcagggggtggaaacgctcgccgacggtgccggctacgtcgcgcagaagaccagcgacgccgtcggctggctgttcggccgctga

SEQ ID NO: 22 - protein, 493 aa, Unknown
  Obtained from an environmental sample.
MTLITPSSKLTLTKGNKSWSSRACRSTLVDPYGIPAGSTLADVAGGTQAQPFDVTLSKLATAVYGTRGAPPEGWSAVSDQQLRDLGVADPTAWRQQFLGGGEQTKAQEFKAEVYTDGNGNYVLSYRGTAEGWDDWQNNFKQGTGFQTDPVDKFSGTAVNTAREFQRVFGNPPGGGATNLAITGHSQGGGLATVGSLATGVPAVTFDASGIHPNTLDRMGLDPQAARDTAEGGQIRAYSLSSDLLTQTQEGGPLGLLAPDAMGTKIVVDPARADEHHMIDHYGAIELEGKSPEELAKLNALVEAARNTPWIPANPLIGTLTGVAHVGGGTVYSAMSHSPNALTAAMIDRQPWQTGYENPSDAGKALQDLVPDVLKDDFARNTHDTVQDVVDVVNGDFARGDYVQGGFSIAGDVGEGFWNSVGDTANRGADALAQKVDDGVDGWAGDVLSGIVRGGGDVLQGASDAVGQGVETLADGAGYVAQKTSDAVGWLFGR

SEQ ID NO: 23 - DNA, 837 bp, Unknown
  Obtained from an environmental sample.
ttgcgcactcgggagggcgtttgccgcgtgaaggacgatcccatcatcctggttcacggtctcttcggattcggagagttggccgtcggtggaaccacgctggtcgcgtatttccgcggcatccgtgagcatctgctcgcaacgggtttcaacgttccacctccgccgcagttgagcacggcgggcaccatcgctgagcgggccgacggtttgaaacgttacctcgagaactcgaccgaagtcggcggcaagccggtgcatttgattgcacacagcatgggcggcctcgactcacgatacctgattcgcaaattgcgaatggccgatcgagtcttgtcgttgactacgatcggcacgccccatcacggaagtccgatcgctgattttctgaaagcggggacctcgccgtccttgcaagcgctcgccgcgcgattcggattgggaggaatcgacaatttaacgacggacttctgtcgtgatttcaatcgcgattgtcccgatgaaccgaaaacttcgcatttgaagtactactcgatcgccggtcgctacgaaccgcgacgccttctcggattgccgaccgggttattggggccgactcacgatctcgttcaaaaagtcgaaggtgacaacgacggaatggtatcggtgagttcggcgagatacggaagcgatttggatcgctgggagccgttagggccgatctgggaggagagccattttcgtctcgtgaactgggacgacgacgtcgctgcggcgcttgggaatctccgcgaccggtcgattcccgcaaggtatcaagccatcgcggaacacgtcacgtcggtcccgcgacgctag

SEQ ID NO: 24 - protein, 278 aa, Unknown
  Obtained from an environmental sample.
MRTREGVCRVKDDPIILVHGLFGFGELAVGGTTLVAYFRGIREHLLATGFNVPPPPQLSTAGTIAERADGLKRYLENSTEVGGKPVHLIAHSMGGLDSRYLIRKLRMADRVLSLTTIGTPHHGSPIADFLKAGTSPSLQALAARFGLGGIDNLTTDFCRDFNRDCPDEPKTSHLKYYSIAGRYEPRRLLGLPTGLLGPTHDLVQKVEGDNDGMVSVSSARYGSDLDRWEPLGPIWEESHFRLVNWDDDVAAALGNLRDRSIPARYQAIAEHVTSVPRR

SEQ ID NO: 25 - DNA, 648 bp, Unknown
  Obtained from an environmental sample.
atgaaagtgatttttgttaagaaaaggagtttgcaaattctcgttgcacttgcattggtgattggttcaatggcttttatccagccgaaagaggtgaaggcggctgagcataatccggttgtgatggtacatggtattggtggtgcctcttataacttttattctattaaaagttacttggttggacaaggctgggatcgaaatcaattatatgctatcgatttcatagacaaaacaggaaataaccgcaacaatggtccgcgtctatccagattcgtccaagatgtgttagacaaaacgggtgccaaaaaagtagatattgtggctcatagtatgggcggggcgaacacattatactatattaagaatcttgatggcggagataaaattgaaaacgttgtcacgattggtggagcaaatggactcgtttcaaacagagcattacctggcacagatccaaatcaaaaaattctttacacatctgtctatagttcagccgatctcatcgtcgtcaacagcctctctcgtttaattggcgcaaaaaacgtcctgattcacggcgttggacatatcggtctattaacctcaagccaagtcaaaggctatattaaagaaggactgaacggcggaggacagaatacgaattaa

SEQ ID NO: 26 - protein, 215 aa, Unknown
  Obtained from an environmental sample.
MKVIFVKKRSLQILVALALVIGSMAFIQPKEVKAAEHNPVVMVHGIGGASYNFYSIKSYLVGQGWDRNQLYAIDFIDKTGNNRNNGPRLSRFVQDVLDKTGAKKVDIVAHSMGGANTLYYIKNLDGGDKIENVVTIGGANGLVSNRALPGTDPNQKILYTSVYSSADLIVVNSLSRLIGAKNVLIHGVGHIGLLTSSQVKGYIKEGLNGGGQNTN

SEQ ID NO: 27 - DNA, 780 bp, Unknown
  Obtained from an environmental sample.
atgataaaaaacttcgacagagaaaattctagcttagtactgtccggtggtggtgctctgggtattgctcacttgggtgtactgcatgaccttgaaaaacaaaatattgtaccaaatgaaattgttggtacaagtatgggtggtatcattggtgcatctatggctatcgggatgaaagagaaagaaatactcgaagaaatcaaaaacttttccaatgtcttcaactggataaaattctctttttccggtaattctgttgtcgataacgagaagatcgctaagatatttgatactctttttaaagacagaaagatgacagatacggtgatccctcttaaactcatcgctacaaacttacataatggacataaaaaagtatttactgcttcggatgatgtactgatcaaagatgcaatactctcaacaatggcaatacccggtgtatttgaagaacatattattgatggtgaaacctatggcgacggttttctttgtgaaaaccttggtgtgaatgaggcaacattcaatgatgttttagctgtagatgtcatgggtgagaactcttttgaaaaagcaatgccggacaacttctttaaaacatcaaatgttttagaaatgtttgaaaaatcaatgcgactttttatttacaaccagacacagacacatattaaaaatgcaaataaaaatatttatcttattgaacccgttaccaaagagtataaaacatttcaatttcataaacataaagagatacgtgctttaggcttgggtttactgtga

SEQ ID NO: 28 - protein, 259 aa, Unknown
  Obtained from an environmental sample.
MIKNFDRENSSLVLSGGGALGIAHLGVLHDLEKQNIVPNEIVGTSMGGIIGASMAIGMKEKEILEEIKNFSNVFNWIKFSFSGNSVVDNEKIAKIFDTLFKDRKMTDTVIPLKLIATNLHNGHKKVFTASDDVLIKDAILSTMAIPGVFEEHIIDGETYGDGFLCENLGVNEATFNDVLAVDVMGENSFEKAMPDNFFKTSNVLEMFEKSMRLFIYNQTQTHIKNANKNIYLIEPVTKEYKTFQFHKHKEIRALGLGLL

SEQ ID NO: 29 - DNA, 732 bp, Unknown
  Obtained from an environmental sample.
ttgagcgctcgcgggcccgccctcgtgctggcgctgttcgtcgccgcggggtgcgggccttcgctcgaggtgctgaccgccggcgggagcgggccgccgacgctcgtgctgttgcacggctacggatcatcggccgaggagtggcgtcctttcacggacacgatcgagtggccggcgccggggcggttcgtgtttccgcaggggccgggagccacccaaaggcccggcgggcgcgcgtggtggccgctcgagctccaggtattttcgaggaccgaccgtgccgcgcccgatctgtcccggacgcggccgcgcgggttgcagcccgcggccgcagcggtttccggccttcttcgacgcctcggctggtcgcccggcggggacatcgttctcggcggcttctcgcaaggcgcgatggtagcgagcgaagtggcgttccgttcaaacgctcgtcttgcggcgctcgtcctgctttcgggcactcccgtcgacgagccatcgtggcaacgcggctatccggcccggcgcggcttgccggtgttcatcgcccacggtcgaaacgatccggtgttgccattcgcgggatcggagcggatgcagcgcgacctcgcggcggccggtctgcgcgtgacgtgggtcccgttcgacggcggccacgaaatccccgccgaagtcgtcgtcgccttgaacgcgttcctgcgcgcgttgcgcgaggcgaagcagcctagcgcctga

SEQ ID NO: 30 - protein, 243 aa, Unknown
  Obtained from an environmental sample.
MSARGPALVLALFVAAGCGPSLEVLTAGGSGPPTLVLLHGYGSSAEEWRPFTDTIEWPAPGRFVFPQGPGATQRPGGRAWWPLELQVFSRTDRAAPDLSRTRPRGLQPAAAAVSGLLRRLGWSPGGDIVLGGFSQGAMVASEVAFRSNARLAALVLLSGTPVDEPSWQRGYPARRGLPVFIAHGRNDPVLPFAGSERMQRDLAAAGLRVTWVPFDGGHEIPAEVVVALNAFLRALREAKQPSA

SEQ ID NO: 31 - DNA, 735 bp, Unknown
  Obtained from an environmental sample.
atgcgcggcagctcccgaaaattgggcgtcgtgctgtgccacggctacatggccgctccggctgaggtcgaaaccctggcagagtatctcggcgggaagggatattgggtctatgccccccggttaaaagggcatggcacggcacccgaggatttggcccgctgcagccacaaggattgggtgcggtcagtggaggagggatacctgctggtacgcaatcgctgtgaccgggtggtggtgggtggcttttccaccggagcggccctggccctggagttggccggtcgggttgccggtttgacaggggtgttcgccgtagctacgcccctgcggctgcaatatgccgcttcaaagctggcgccggtggtggatacctggaaccgattgatgggcaaggtgcgctgggaagaggccaaaaaagagttcgtggaaaaccggccggaaaacccccacatcaattacgggcgcaatcccatctccggtgtgcgggaattggagcgtttgatggatctggtggagccccggttgccggacatcactgttccggccatggtgatccaatcgctggaggatccggtggtgcatcccaaaggctcggagcggatttttcactccctcggatcggtagacaagcagtatgtgctgttcgatttcaaacggcacgggattttgctcggggagggttccgagcgggtgcatcatacgatcggtgccttcattgatcggttgcgctaa

SEQ ID NO: 32 - protein, 244 aa, Unknown
  Obtained from an environmental sample.
MRGSSRKLGVVLCHGYMAAPAEVETLAEYLGGKGYWVYAPRLKGHGTAPEDLARCSHKDWVRSVEEGYLLVRNRCDRVVVGGFSTGAALALELAGRVAGLTGVFAVATPLRLQYAASKLAPVVDTWNRLMGKVRWEEAKKEFVENRPENPHINYGRNPISGVRELERLMDLVEPRLPDITVPAMVIQSLEDPVVHPKGSERIFHSLGSVDKQYVLFDFKRHGILLGEGSERVHHTIGAFIDRLR

SEQ ID NO: 33 - DNA, 633 bp, Unknown
  Obtained from an environmental sample.
atgaagaaaacgtttgtcgcattaattcttgctttatccctggttgtatctgcattaggaattcagccttcgaatgctaaagctgaatcaaatcacaatccggttgttcttgttcatggaatcagcggtgcgtcctataactttattgctatcaaaaactacttaattgctcaaggttgggatcgcaatgatctttatgctattgattttgtagataagacaggcaacaatttgaataatggacctcagcttgctcgatacattgatcaagtgttgaaagagacgggagctaagaaggtagatattgttgctcatagtatgggcggagcaaacacgctgtattatattaaatatctagggggagggaataagattgaaaatgtcgtgacgttaggaggagcgaatggtttagtttcttcgacagcactcccaggtacagatctcaatcaaaaaattctttatacgtcgatctacagcataaatgatcaaattgttgctaatagtctctctaggctgcaaggagcaagaaacattcaactttatggcattggacatattggattgctttcaaatagtcaggttaacgcgtacataaaagaagggctgaatggcgggggacaaaatacaaactaa

SEQ ID NO: 34 - protein, 210 aa, Unknown
  Obtained from an environmental sample.
MKKTFVALILALSLVVSALGIQPSNAKAESNHNPVVLVHGISGASYNFIAIKNYLIAQGWDRNDLYAIDFVDKTGNNLNNGPQLARYIDQVLKETGAKKVDIVAHSMGGANTLYYIKYLGGGNKIENVVTLGGANGLVSSTALPGTDLNQKILYTSIYSINDQIVANSLSRLQGARNIQLYGIGHIGLLSNSQVNAYIKEGLNGGGQNTN

SEQ ID NO: 35 - DNA, 1425 bp, Unknown
  Obtained from an environmental sample.
atgggtgtgtttgactataaaaaccttggggccgagggctccaaggccttgtttgccgatgccatggcgatcacgttgtatacctaccacaacctggataacggctttgccgtgggctaccagcacaatggcctgggcgtcggcttgccggctactctggtcggcgcattgctcggcagtacggactcccagggtgtgatcccaggcattccctggaacccggattcggagaaggccgcgctcgaagcggtgcagaaggccggctggacgcccatcagcgccagcaccctcgggtataccggcaaggtcgacgcccggggcacgttcttcggcgaaaaggccggctacaccacggcccaggtcgaggtgctgggcaagtacgatgacgcgggccagttgcaggaaatcggcatcggttttcgcggcacgtctggcccaagggaaacactgatcaccgactccatcggcgatctggtcagcgacctgcttgctgcgctgggtcccaaggattacgcaaagaactacgccggcgaagcattcggcggcttgctcaagagcgtcgccgagtatgcggcggcccacggtctcagcggccaggatgtgctggtcagcggccatagcctcggcggcctggcggtcaacagcatggccgacttgagcgacgccaagtggtccgggttctataaggacgccaactacttggcctacgcctcaccgacccagagtgccagcgacaaggtgcttaatatcggctacgaaaacgacccggtgttccgcgccctggacggctcatccgccaacctgtcgacgctcggtgttcacgacaaaccccacgagtccaccactgacaacattgtcagcttcaacgatcactacgcctcgaccctgtggaatgtgctgccgttttccatcgccaatctgccgacttggatctcgcacttgccgaccggctacggcgacggcatggggcgcattctggagtccgggttctatgaacagatgacccgggactcgacgattatcgtggccaatctatccgacccggcacgggccaccacttgggttcaggacctgaaccgcaacgccgaaccgcacacaggcgacactttcatcattggcagcgatggcgatgatctgatcctgggcggcaagggcgcggactttatcgaaggcggcaagggcaatgacacgatccgcgacagcagcgggcataacacctttttgttcagcggccagtttgggcaggatcggattatcggttatcagccgacggataaactcgtgttccagggtgtggcgggcagcggggattaccgtgatcacgccaaggtggtgggtggggatacggtgatcagtttcggggcggattcggtgacgttagtgggcgttagcggggtgttgggggagggggttgtgatcggctga

SEQ ID NO: 36 - protein, 474 aa, Unknown
  Obtained from an environmental sample.
MGVFDYKNLGAEGSKALFADAMAITLYTYHNLDNGFAVGYQHNGLGVGLPATLVGALLGSTDSQGVIPGIPWNPDSEKAALEAVQKAGWTPISASTLGYTGKVDARGTFFGEKAGYTTAQVEVLGKYDDAGQLQEIGIGFRGTSGPRETLITDSIGDLVSDLLAALGPKDYAKNYAGEAFGGLLKSVAEYAAAHGLSGQDVLVSGHSLGGLAVNSMADLSDAKWSGFYKDANYLAYASPTQSASDKVLNIGYENDPVFRALDGSSANLSTLGVHDKPHESTTDNIVSFNDHYASTLWNVLPFSIANLPTWISHLPTGYGDGMGRILESGFYEQMTRDSTIIVANLSDPARATTWVQDLNRNAEPHTGDTFIIGSDGDDLILGGKGADFIEGGKGNDTIRDSSGHNTFLFSGQFGQDRIIGYQPTDKLVFQGVAGSGDYRDHAKVVGGDTVISFGADSVTLVGVSGVLGEGVVIG

SEQ ID NO: 37 - DNA, 2241 bp, Bacteria
atgaaaaatagagaaaataaatatagtattcgtaaatttagtgtaggaacatcttccattttaatcgcagcattattatttattggtggaggttctgctcaagcagctgaaaatcaagataagggaaatgttgattcagaagcacaacaagcacaatctattggggaacaacagggaaatgatgttaaaaatgaacaaacaaatcaatctagtgaattaaaagaacgtaacgatagcgttgaagcacaaaatgacaatcaacaagatgcaacaccaacaagcttacataaagaaacatctgagaaagatactacacaaacgtcacaagacaatactgaagagaaacaaacaaaagatgcaacagtagaaactgagcaatcagctaatcaagtgcaacaagatgttaaaacaactaaagaaaaaacaacagaagatcaagcaacaaagtctgttgaaaaatctgatgctacaacgccaaatcaaaaggacaaagctgatggcaaagcaacaaaagaagaaacgccaacacctagtccaaaggcgcaagataaagcatcatcaactcaaacgcatcaacatgatgtagatccagaatttaatagcaaacataaagcttcacaagtggatccagaatttagtcataagcaagcgcaaaagaaagcggatgtagattcagagttcaataaaaatcataaagcgcaacaggtcgatccagatttctctcgacgtcatgctacagaaaaagcgactcatgctactgtgaataaagaaaaagcagatgccacaattaatcaaaaagaccaacaaaaagtgacagcacaatcagttgatcaaaaagctacagctccgaagcaaactgattcatctcaaaaatcaaaacaaaagcaacctgtctctcttgaacaattagaaaaagattcaccattattatcaaaagataatccaagtaaaaaagataaagaacaaaaagacggtttacaagcgctaaaatcgaattcagttgccacattaaataatcagtctaaaaataaagtagctgtagcagataaagaccaaacaaataagaaagctaaacaacaacagtataaaaatcatgatcctatcattctcgttcatggatttaatggattcactgatgatattaacccagctgttttatcacattattggggtggcgataaaatgaatattcgccaagatttagaagaaaacggctacaaatcatatgaagcaagtatcagtgccttcggtagtaactatgacagagcggtagaactatactactatatcaagggtggtcgtgtagattacggtgcagcacatgctgcgaaatatggtcatgagcgatatggtaaaacatatgaaggtgtatataaagactggaaaccaggtcaaaaagtgcacttagttggtcatagtatgggtggacaaacgattcgccaacttgaagaacttttaagaaatggtaaccaagaggaaattgagtatcagaagaaacatggtggtacaatttcaccattattcaaaggcaataatgataatatggtttcttcaattacgacacttggtacaccacataatggtacacacgcttcagatgtattaggtaatgaagcggttgtaagacaggttgtttatgatattggtaaagcctttggtaataaagattcaagagtcgactttggtttatctcaatggggcttaaaacaaaaaccaaatgaatcatatatcgattatgctaaacgtgtgaaaaactctaagttatggaaatcacaagacaatggtttctatgatttaactcgagatggtgcaacagacttaaaccgtaaaacatcattaaatccaaatattgtatataaaacatatactggtgaggcaacacatccatcactatttggtagacaaaaagcagatttaaacatgttcttaccatttattttaactggaaatgtgatcggtaaagctaacgaaaaagaatggagagaaaatgatggacttgtatctgtgatttcttcacaacatccatttaatcaaaaatatacacaagcaacagataaaaaccaaaaaggtatttggcaagtaacacctacaaaacatgattgggatcatgttgactttgttggacaagatagttctgatacagtaagaactagagaagaattacaacaattctggcatggtctagcagatgatttagtacaaagtgaaaagttaacatcagagcaaaaagcacaagcataa

SEQ ID NO: 38 - protein, 746 aa, Bacteria
MKNRENKYSIRKFSVGTSSILIAALLFIGGGSAQAAENQDKGNVDSEAQQAQSIGEQQGNDVKNEQTNQSSELKERNDSVEAQNDNQQDATPTSLHKETSEKDTTQTSQDNTEEKQTKDATVETEQSANQVQQDVKTTKEKTTEDQATKSVEKSDATTPNQKDKADGKATKEETPTPSPKAQDKASSTQTHQHDVDPEFNSKHKASQVDPEFSHKQAQKKADVDSEFNKNHKAQQVDPDFSRRHATEKATHATVNKEKADATINQKDQQKVTAQSVDQKATAPKQTDSSQKSKQKQPVSLEQLEKDSPLLSKDNPSKKDKEQKDGLQALKSNSVATLNNQSKNKVAVADKDQTNKKAKQQQYKNHDPIILVHGFNGFTDDINPAVLSHYWGGDKMNIRQDLEENGYKSYEASISAFGSNYDRAVELYYYIKGGRVDYGAAHAAKYGHERYGKTYEGVYKDWKPGQKVHLVGHSMGGQTIRQLEELLRNGNQEEIEYQKKHGGTISPLFKGNNDNMVSSITTLGTPHNGTHASDVLGNEAVVRQVVYDIGKAFGNKDSRVDFGLSQWGLKQKPNESYIDYAKRVKNSKLWKSQDNGFYDLTRDGATDLNRKTSLNPNIVYKTYTGEATHPSLFGRQKADLNMFLPFILTGNVIGKANEKEWRENDGLVSVISSQHPFNQKYTQATDKNQKGIWQVTPTKHDWDHVDFVGQDSSDTVRTREELQQFWHGLADDLVQSEKLTSEQKAQA

SEQ ID NO: 39 - DNA, 783 bp, Unknown
  Obtained from an environmental sample.
atgacacgaaaaaaaatcggcttggctttatccggcggcgcggcgcgtggcttcgcacatctcggagttttgaaagttttcgccgaacacggcattcccgtcgatttcgtcgccggaacgagcgccggttcgtttgcgggcgcggctttcgcttccggtttaagcgtggcggaaatcatcgaaatgtcaaggaaaatcagttggtttcggatgaccggattttcgtactcgccgaaaggcttgctgtcgaacgcgccgatgggagcgtttatcaatcagcattttccgcgcaaaaaatttgaagaactgccgataccgttcgcggcaattacgtgcgatctcgaaaccggcgaggaaatcgtgcttaaagaaaccggcgacgtggcgactgccgtccgtgcgagctgcgcgctgcccggcgtcttcgtgccaatcgaatacggcggacggcgattgatagacggcggcgtcgtgtcgaacgtgccgacgagagccgtcaaaaagctcggcgcggaaatcattattgcggttgacgttctggcgtgcggcacaacttactggggttcgccttccactttgctcggcatctttttccaatcggcgatgatgcttctccgcgccgcttcaaaatctcatcattaccgcgcgagcgtcgtcatcacgccgcaaatcgctcatctgcgcccggacgaaatcagcaaaatggacgaatttatcaaagcgggcgaacaagccgcgcttgaaaaagttgacgaaatcaaggctttgctcgccgaacaataa

SEQ ID NO: 40 - protein, 260 aa, Unknown
  Obtained from an environmental sample.
MTRKKIGLALSGGAARGFAHLGVLKVFAEHGIPVDFVAGTSAGSFAGAAFASGLSVAEIIEMSRKISWFRMTGFSYSPKGLLSNAPMGAFINQHFPRKKFEELPIPFAAITCDLETGEEIVLKETGDVATAVRASCALPGVFVPIEYGGRRLIDGGVVSNVPTRAVKKLGAEIIIAVDVLACGTTYWGSPSTLLGIFFQSAMMLLRAASKSHHYRASVVITPQIAHLRPDEISKMDEFIKAGEQAALEKVDEIKALLAEQ

SEQ ID NO: 41 - DNA, 813 bp, Unknown
  Obtained from an environmental sample.
atggaatcgacgattcagccgctcgaccgcgtgtttttgcaccttggccccattacgatttattggtatggggtcattatcggcaccggtgtgttgattgggctatggctcgcgacgcgcgaagcggtgcggcgcggcttgccgaaagagacgtttgtcgatttggtgttatttgccgtgccgatcgccattgtctgcgcgcgggcgtactacgtgctgtttgaatggcactattattcaaagcatttgtccgagattccaaaagtttggcaaggcggcctcgccattcacggcggtttgatcggggcggtggcgacgggcgcggtgttcgcccgcgcgcgcgggctgtcgttttggaagctcgccgatattgccgcaccaagcatcattttaggccaggcgatcgggcgctggggcaattttatgaaccaagaggcgcacggcggccctgtgtcgcgccagtttcttgaaaatttgcatttgccggattggatcatcaatcaaatgtacattgacggccgttattggcatccgacttttttatatgagtccctttggaacctcgtcggctttttcttgcttctttggctgcggcgcgtcaatttgcggcgcggcgagctgtttttgtcctatttgatttggtattcggttggccgtttctggattgaagggatgcgcaccgacagcttgatgctggccggcagtctgcgcgcggcgcaagtcgtatccgtgacgctgatcgtgttgtcgatcgcgctgtggatcgtgcgccgggcgaaaggatgggcaaaagcaaggtatcaagacgaatag

SEQ ID NO: 42 - protein, 270 aa, Unknown
  Obtained from an environmental sample.
MESTIQPLDRVFLHLGPITIYWYGVIIGTGVLIGLWLATREAVRRGLPKETFVDLVLFAVPIAIVCARAYYVLFEWHYYSKHLSEIPKVWQGGLAIHGGLIGAVATGAVFARARGLSFWKLADIAAPSIILGQAIGRWGNFMNQEAHGGPVSRQFLENLHLPDWIINQMYIDGRYWHPTFLYESLWNLVGFFLLLWLRRVNLRRGELFLSYLIWYSVGRFWIEGMRTDSLMLAGSLRAAQVVSVTLIVLSIALWIVRRAKGWAKARYQDE

SEQ ID NO: 43 - DNA, 711 bp, Unknown
  Obtained from an environmental sample.
atgttcttgattcatgcgcggttgcggctatccgcggggattgcgctggcgtcgctggcggctcttgtgtccgcctgcggcggcgcctcggcccctgccgaagcccctcagtcagcgtctgcgcaggatccgaacgcgccgccggcccggcccaaggtcgtcattctcggcgacagcctgaccgccggacttggtctcgtcgaatcgcagtcctttccggcgcgcctgcagcagcgggtagacgaggaaggctacgcgttcgacgtggtcaacgcgggtgtgtccggtgacacgtcagcgggcggcttgcggcgtctggactgggcgctcgagggggacgtgcgcgtgctcgtggtcgcgctcggcgccaacgacggtctccgcggcctgtcggtctccgacatgaaaaagaacctcgcggcgatcatcgcgcggggcaaagcgcgcggcgtcaccgtgatcctggccggcatggaggcgccccccaactacggacaggaatacgccgccgcgtttcgacaagccttccgccaggtggccctcgagcagcgcgtgctcttcatcccgtttctgctgcaggacgtggcgggtcactcggcgctgaaccagtccgacggcatccatccgaacgccgacggtgcgtcccgggtcgcggagacggtttggggcgtgctcgggccgacgctcgatcagatggcggccgcttcatga

SEQ ID NO: 44 - protein, 236 aa, Unknown
  Obtained from an environmental sample.
MFLIHARLRLSAGIALASLAALVSACGGASAPAEAPQSASAQDPNAPPARPKVVILGDSLTAGLGLVESQSFPARLQQRVDEEGYAFDVVNAGVSGDTSAGGLRRLDWALEGDVRVLVVALGANDGLRGLSVSDMKKNLAAIIARGKARGVTVILAGMEAPPNYGQEYAAAFRQAFRQVALEQRVLFIPFLLQDVAGHSALNQSDGIHPNADGASRVAETVWGVLGPTLDQMAAAS

SEQ ID NO: 45 - DNA, 1425 bp, Unknown
  Obtained from an environmental sample.
atgggcgtgtttgactataaaaaccttggggccgagggctccaaagcgttgtttgccgatgccatggcgatcacgttgtatacctaccacaacctggataacggctttgccgtgggctaccagcacaatggcctgggcgtcggcttgccggctactctggtcggcgcattgctcggcagtacggactcccagggtgtgatcccaggcattccctggaacccggattcggagaaggccgcgctcgaagcggtgcagaaggccggctggacgcccatcagcgccagcaccctcgggtataccggcaaggtcgacgcccggggcacgttcttcggcgaaaaggccggctataccacggcccaggtcgaggtgctgggcaagtacgatgacgcgggccagttgcaggaaatcggcatcggttttcgcggcacgtctggcccaagggagacgctgatcaccgactccatcggcgatctggtcagcgacctgcttgcggcgctgggtcccaaggattacgcgaagaactacgccggcgaagcattcggcggcttgctcaagaacgtcgccgagtatgcggcggcccacggtctgagcggccaggatgtgctggtcagcggccatagccttggcggcctggcggtcaacagcatggccgatttgagcgaggccaagtggtccgggttctataaggacgccaactacttggcctacgcctcaccgacccagagtgccagcgacaaggtgcttaatatcggctacgaaaacgacccggtgttccgcgctttggacggctcatccgccaacctgtcgacgctcggtattcacgacaaaccccacgagtccaccactgacaacattgtcagcttcaacgatcactacgcctcgaccctgtggaatgtgctgccgttttccatcgccaatctgccgacctggatctcgcacttgccgaccggctacggcgacggcatggggcgcattctggagtccgggttctatgaacagatgaaccgggactcgacgattatcgtggccaatctatccgacccggcacgggccaccacttgggtgcaggacctgaaccgcaacgccgaaccgcacacaggcgacacttttatcattggcagcgatggcgatgatctgatccagggcggcaagggcgcggactttatcgaaggcggcaagggcaatgacacgatccgcgacagcagcgggcataacacctttttgttcagcggccagtttgggcaggatcgaattatcggttatcagccgacggataaactcgtgttcgagggtgtggcgggcagcggggattaccgtgatcacgccaaggtggtgggtggggatacggtgatcagtttcggggcggattcggtgacgttggtgggcgttagcggggtgttgggggagggggttgtgatcggctga

SEQ ID NO: 46 - protein, 474 aa, Unknown
  Obtained from an environmental sample.
MGVFDYKNLGAEGSKALFADAMAITLYTYHNLDNGFAVGYQHNGLGVGLPATLVGALLGSTDSQGVIPGIPWNPDSEKAALEAVQKAGWTPISASTLGYTGKVDARGTFFGEKAGYTTAQVEVLGKYDDAGQLQEIGIGFRGTSGPRETLITDSIGDLVSDLLAALGPKDYAKNYAGEAFGGLLKNVAEYAAAHGLSGQDVLVSGHSLGGLAVNSMADLSEAKWSGFYKDANYLAYASPTQSASDKVLNIGYENDPVFRALDGSSANLSTLGIHDKPHESTTDNIVSFNDHYASTLWNVLPFSIANLPTWISHLPTGYGDGMGRILESGFYEQMNRDSTIIVANLSDPARATTWVQDLNRNAEPHTGDTFIIGSDGDDLIQGGKGADFIEGGKGNDTIRDSSGHNTFLFSGQFGQDRIIGYQPTDKLVFEGVAGSGDYRDHAKVVGGDTVISFGADSVTLVGVSGVLGEGVVIG

SEQ ID NO: 47 - DNA, 882 bp, Unknown
  Obtained from an environmental sample.
atgctgcgttcgttcgtgtcgatgcgctcgttggtgtcgaaaggtcttgccgtcggcttactcgcgagcacactcgccgtgctggctcccggtccggtcgaagcccagtcgtccggcggggtgaacaactggcggtgccagccgtcccaggatcatcccaacccggtggtcctgctccacggtctcggcgccccgtcggacggccactggtcgtacctggccccgaagctggccggcgagggctactgcgtcttctacttcacctacggcaaggtcaccccgctcatccccctggggggcttcaggccaatagccgactcggctgccgagatcgaagcgttcatcgaccgcgtgctgagggcgacgggtgcgggcgaggtcgacatcgtcggtcactccgaaggcggcttcctgtccctgtacgtccccaagatgcgccaggcgggagacaaggtgggcactgtggtcgcgctggctcctcccacgcacggcaccaccttcgccgggctggtcgggatcgccgactacctcggggtgcgtcccctggtcaacgtcatcctgcggaccttcggctgtgacgcctgcaacgacctgatcacagacggtcccgccgtgcgcgaactgaccgacggtccggtagcggtggcgggtgtcgactacacgatcatcgtgagcaggttcgacgtgctggtcacaccggtggagacgtcgttcgtcgacgagcccggagtgaccaacatgtacgtgcaggacgactgcccgctcaacccggtcggtcacatcgggatggcgttcgacagcagtatcgccacgatgatcaccaacgcgctggaccccgacaacgccaagccggtgcgctgcaccatcggcctaccgttctag

SEQ ID NO: 48 - protein, 293 aa, Unknown
  Obtained from an environmental sample.
MLRSFVSMRSLVSKGLAVGLLASTLAVLAPGPVEAQSSGGVNNWRCQPSQDHPNPVVLLHGLGAPSDGHWSYLAPKLAGEGYCVFYFTYGKVTPLIPLGGFRPIADSAAEIEAFIDRVLRATGAGEVDIVGHSEGGFLSLYVPKMRQAGDKVGTVVALAPPTHGTTFAGLVGIADYLGVRPLVNVILRTFGCDACNDLITDGPAVRELTDGPVAVAGVDYTIIVSRFDVLVTPVETSFVDEPGVTNMYVQDDCPLNPVGHIGMAFDSSIATMITNALDPDNAKPVRCTIGLPF

SEQ ID NO: 49 - DNA, 792 bp, Unknown
  Obtained from an environmental sample.
atggtatctattggatttgaggagttaaaaaaaggggatttttcactggttctttctggaggaggggctttgggaattgctcatcttggagtaataagagacttagaaaaatctaatttaaaaccttctgaaattattggaactagcatggggggaattattggagcttgtgttgcaattggaatgagagaaaaagagatttttgaaaatatagaaagatttgctaaagtaggaaaatggataaaactctctttaagtggaaattcaattataaaaagtgaaaaaattgaagctatctttgatgaaatttttggagaaattaaaatttctcaaacaaaaattcctctaaaacttatttgtacgaatcttttgacaggtaaaaaaagagtatttaactcttctgacaacatagaattaaaaaaagctctactttgtacaatggcaattcctggaatttttgaggaacaaattatagatgatgaggtcttaggtgatgggtttttgtgtgaaaatttgggagtaaatgaggcaaaaaaagagtatcttttagcagttgatgtaatgggatatgattcattttctcatcaacttccaaaaaattttttaaaaactgcaaatattttggaaatgtttgaaagatcaatgagacttttaatatttaatcagactcaaaaccttcttagatgttgtgataaaaaaatctttcttgtctctccaaaaactaaagattataaaacttatcattttcataaggcatctgaaattagagaacttggaagaattttttcttaa

SEQ ID NO: 50 - protein, 263 aa, Unknown
  Obtained from an environmental sample.
MVSIGFEELKKGDFSLVLSGGGALGIAHLGVIRDLEKSNLKPSEIIGTSMGGIIGACVAIGMREKEIFENIERFAKVGKWIKLSLSGNSIIKSEKIEAIFDEIFGEIKISQTKIPLKLICTNLLTGKKRVFNSSDNIELKKALLCTMAIPGIFEEQIIDDEVLGDGFLCENLGVNEAKKEYLLAVDVMGYDSFSHQLPKNFLKTANILEMFERSMRLLIFNQTQNLLRCCDKKIFLVSPKTKDYKTYHFHKASEIRELGRIFS

SEQ ID NO: 51 - DNA, 915 bp, Unknown
  Obtained from an environmental sample.
gtgactatcgctttaacccttcctctcttatcgtgttcctctgagcaaagtaccccgcagcccttaccaacctcgctaccgatggctacccagacctcctccgctttgcccatcccttttaatcgatatggcgagacgctgacgaacatcacatactgcacgccggataattctccccaaatgctggatatttactttccggactcaggtggaccctggcccgtgttggtttacattcacggcggcagttggatgtatggtgacaagtcggaaccgatgatctccctgtttgccagcgggatgaacgcgcagggctatctggtggttcccgttaattatcggttgtatcccgatgcatcatttcccgctatgatccaggatgtgaaatgcgcggtccgttttctgcgagcgcacgcagcggagtacaacctggacccgaaccgcgtgggcgcggtgggtgtgagtgcaggcggacatctcgcgtcgctgctggggactacagatgtaagcgcaggttgggatgtgggggagtatcttgaccaatcgagcagtgtccgagcagtgattgccattgccggagtcatggacttgtcgcgacccatccccaatgccgatctcgaaacgatggagcgaatgggattcggcagccagaatgcgatgaacgccagcccaattacgcatgtaaccgcagactcgtcgccgtttttactaatccacggcgaccgcgatgaggtcgtccctgtggaacaatcgcagttgatgtacgaccgcctgctgctggaacaagtcccggcgcagttggtggtgatccagaatgcacagcattctttcattgctccggacgaaaccacaacgcccacgcttccagagatcaatcagatcattcaggatttcctggcacgatatctaaaatag

SEQ ID NO: 52 - protein, 304 aa, Unknown
  Obtained from an environmental sample.
MTIALTLPLLSCSSEQSTPQPLPTSLPMATQTSSALPIPFNRYGETLTNITYCTPDNSPQMLDIYFPDSGGPWPVLVYIHGGSWMYGDKSEPMISLFASGMNAQGYLVVPVNYRLYPDASFPAMIQDVKCAVRFLRAHAAEYNLDPNRVGAVGVSAGGHLASLLGTTDVSAGWDVGEYLDQSSSVRAVIAIAGVMDLSRPIPNADLETMERMGFGSQNAMNASPITHVTADSSPFLLIHGDRDEVVPVEQSQLMYDRLLLEQVPAQLVVIQNAQHSFIAPDETTTPTLPEINQIIQDFLARYLK

SEQ ID NO: 53 - DNA, 1371 bp, Archaea
atgcttagggctgttgctctggttatggcgctgctgttgattcctgccgctggagcgtttgagtacctcggcgaggtttacacggcaaaaacggatgacggagtaaaaatcaagctgctgagataccacccgccgggagaaggtgtaaacgacggtgtacagccggttgtgctgttttcggggctgctctgcaacatgaacgaatacctgactcacacacctccggaactcaaagacctctacaaaactcagcttccatcagagcttgcggactgggccgtgggggatgagagaatccagcaggaccccatgctttactacagccttgcatacaacctctggaagcagggatacgacgtctggctcgtgaactacagggggacgggcgttggggagctgaaaagcggtgtcggctctgcaagaacgagcctcgatacgtgggcgatttacgacacaaaggcggcgattacgaaggtttacgaggtgacgggaaagcatccggtgataggggggcacagcaccggtgggcttgtgagctacgtttacctgcagggcgctaaattcaaatggactttcgcctgccttttcaaaaagccgtggtgcaagaaggtcgtttcggatgatgatttggtgagggaaaggaacggattgaccgagggtgaggagactgttgttggagtaattgccctcgacccggcaatgattccaccactgcccaagctcacagacctgaagctgatgtggcttctcctcgacaccccgctttacatcgacatcagggggatcatgaatctaattgcgaagaacgacaggctgtggtgcgccactacccacactatagatgaggtctttgagctaatatttgagatgaacgaggagtacgggcagtacagcgaactcataagagatttaaccttcacaaaccccggcaacatgaatgacgagctgaacgatttccttgtaagatacgtcgctgacagcctctacactcccacactggcccactacaacgatttcggaactcacaggactgcgagggaatacttcgagaacggtggcagaagctacctaattgttcccccagaaccaaatcccggaaaggatggctactactattacattctgaacatgcagaaagtcagagtcccgttcataacgctgctctcagaatacgatgcgcttgttgaggcggaacagataatcagagacctgatggaggccaagacaccacaccagttcgacgagtactacataattgagggcacagcccatcttgacttgcccttcgggctgaaggcgccgagcgaggtttttccgaaagttggggcgtggctggagaaggtaagggtgtacccggtgactccccactga

SEQ ID NO: 54 - protein, 456 aa, Archaea
MLRAVALVMALLLIPAAGAFEYLGEVYTAKTDDGVKIKLLRYHPPGEGVNDGVQPVVLFSGLLCNMNEYLTHTPPELKDLYKTQLPSELADWAVGDERIQQDPMLYYSLAYNLWKQGYDVWLVNYRGTGVGELKSGVGSARTSLDTWAIYDTKAAITKVYEVTGKHPVIGGHSTGGLVSYVYLQGAKFKWTFACLFKKPWCKKVVSDDDLVRERNGLTEGEETVVGVIALDPAMIPPLPKLTDLKLMWLLLDTPLYIDIRGIMNLIAKNDRLWCATTHTIDEVFELIFEMNEEYGQYSELIRDLTFTNPGNMNDELNDFLVRYVADSLYTPTLAHYNDFGTHRTAREYFENGGRSYLIVPPEPNPGKDGYYYYILNMQKVRVPFITLLSEYDALVEAEQIIRDLMEAKTPHQFDEYYIIEGTAHLDLPFGLKAPSEVFPKVGAWLEKVRVYPVTPH

SEQ ID NO: 55 - DNA, 1260 bp, Unknown
  Obtained from an environmental sample.
ttgaaagtaaaaggaaaatacatattaaccatcatgactattattgtagtgttgctatttcctattgaaactcaagcggctttacagaccaatacttcgtcaaaacagaatgattatcccctcgtactagtccatggattaatgggttggggtaaaggagaagcactggggtataaatactggggaggacttaaggacatagaaaactatttgaatcaaaatggtcacaaaacatatgtagcgacggttggcccggtatcaagtaactgggatcgtgctgtagagctttattattatattaaaggtggacgagttgattatggagctgctcatgctaaagagcacagccattctaggtatggaaggacttttccgggaatctatagccaatgggataaaacgaataaaatacaccttgtcggtcatagtatgggtggacaaaccactagaacacttgttgaactactcgaaaacggcagtaaagaggagcaaatgtattataaggagcacagagacgaaggcatatcttccttgtttgaaggaaaaaaaagctgggtacatagtgtaactagtctcgccacacctcataatgggtcaacctttgctgaccaagaatcgctcattccttttattaaagagcttattattaagttagccagtacaaccggtgtatcaagcgagagtttagtttacgattttaaattagaacaatggggattaaaacgaaaccctgaagaaagcttcactgtttatttggatcgtgttttgaaaagtaaggtatgggaaagtgatgatattagctcatatgatttgtctacatatggagcccaggagctgaataattgggttaaaacacatccagatgtatactatttttcacacactgggaatgcttcctataaaggtctagtaacaggacatgcttatcctattttgacgatgaatccaattatgataggtcctagtaaattaattggttcatacactcgttttaacccagaacctatcattgataaatcatggttcccgaacgacggtctggtaagtgtagtttcatcgaaattcccagcaggccagccaaacaaaccaatggacggagctgttactgttacgaaaggagaatggaactacctttcaactatggaaggttgggatcacatggactttatcggtattctcggttcaaacacaccaggttactggaatatttatggttattataaagatatagcccagaaattacatgaattgccaaagtaa

SEQ ID NO: 56 - protein, 419 aa, Unknown
  Obtained from an environmental sample.
MKVKGKYILTIMTIIVVLLFPIETQAALQTNTSSKQNDYPLVLVHGLMGWGKGEALGYKYWGGLKDIENYLNQNGHKTYVATVGPVSSNWDRAVELYYYIKGGRVDYGAAHAKEHSHSRYGRTFPGIYSQWDKTNKIHLVGHSMGGQTTRTLVELLENGSKEEQMYYKEHRDEGISSLFEGKKSWVHSVTSLATPHNGSTFADQESLIPFIKELIIKLASTTGVSSESLVYDFKLEQWGLKRNPEESFTVYLDRVLKSKVWESDDISSYDLSTYGAQELNNWVKTHPDVYYFSHTGNASYKGLVTGHAYPILTMNPIMIGPSKLIGSYTRFNPEPIIDKSWFPNDGLVSVVSSKFPAGQPNKPMDGAVTVTKGEWNYLSTMEGWDHMDFIGILGSNTPGYWNIYGYYKDIAQKLHELPK

SEQ ID NO: 57 - DNA, 918 bp, Unknown
  Obtained from an environmental sample.
atgacgactgacgtcctgcctgcccccgatggtcacgccattttcctgcaccgctggctggcgcccggtgaatgccgcggcaccgtactgtggttgcatggtatggccgaacacggcgcccgctatgcgcctctggcagatgccctgaatgccaatgggtggaacctttactgccccgatcatcgaggccatggcggcagtgtccgcgatgagagcctgcgcgggcattttgcagatcaggacggctggcagaaggtgcttgatgacgtggctgtgctggcggcagacattcgtgatcgtcatcccggccgcccgctgattctggccggacacagcatgggcagctttatcgcgctggccagcgcggagcagtggccggacagctttgatggtctgattctgtgcggcagtgactacaagccgtcctggttgtggcgactcactttgttgccggtaaaactggaacgctggcgttgtggcccacggggccatagcgcactgatcaaggccctgagctttgatgcctttgcccgccagatccgcggacggcgcactgaatttgactggttaagccgggatgcggagcaggtggatcgctatattgctgccccctggtgcggacatgactgcagcacccagctctggcacgacctgatcggcgccatggtgaccgtggatggaaacaaggcgctgcgccagctacctgcgcggctgccagtgatgctgattggtggtgacagcgaccccatgagtggcaatggcaagggcatgccggctctttatcgcgccctgcaccgggctggcattgccgatctggcactggggttgttcagcgacggacgtcatgaaattctgaacgatctctgtcgcgaggcagtacacgaagatctgctcggctggctggcggagcgcttctga

SEQ ID NO: 58 - protein, 305 aa, Unknown
  Obtained from an environmental sample.
MTTDVLPAPDGHAIFLHRWLAPGECRGTVLWLHGMAEHGARYAPLADALNANGWNLYCPDHRGHGGSVRDESLRGHFADQDGWQKVLDDVAVLAADIRDRHPGRPLILAGHSMGSFIALASAEQWPDSFDGLILCGSDYKPSWLWRLTLLPVKLERWRCGPRGHSALIKALSFDAFARQIRGRRTEFDWLSRDAEQVDRYIAAPWCGHDCSTQLWHDLIGAMVTVDGNKALRQLPARLPVMLIGGDSDPMSGNGKGMPALYRALHRAGIADLALGLFSDGRHEILNDLCREAVHEDLLGWLAERF

SEQ ID NO: 59 - DNA, 1005 bp, Unknown
  Obtained from an environmental sample.
atgtttaaaataaatcggattttattctcagtctttgtcgccatcatgtgttttatggttgcaccggcacaagcagatagttcaggaatagatagatcaggaaaaacaaaatacccggtagttttagtacatggcctttcaggttttgacagcgtgtttgcagattatttttatggcgtaaaaggcgcgttagccagtgttggttctaccgaggtatatacaccactgattacgggatttaatacgagtgaagtacgtggagagcaattgctgagttatctggaggatttgaaagcggtcaccggtgcgcaaaaatttaacctaataggccattctcaaggtggtatcgatgcacgttacgtggcttccgttcgaccagacttagtcgcgtcggttacttctgttggttctccccattttggctctggcactgcagatttagttaaagattcgccactcgaaggtgcagctatggatataggtaatgctgtgggtgcacttttagcggctgttaccggggatacatcgcagcaggtagatgccatgggggctcttgaagcattaaattcagcggatgcggcggttttcaatgctaaatatcctgaagggttacgtcagggggattgtcaggaaacccctcgttataatgccggttcttggtggtggccaaattgggtttatgattactctgttaatgatggtgagcacaacgtaaatggtgtggcttattactcatggggaggaacttacaaccctgtgtttaattcaaatgtgctggatctggctgatggtttgttagcggcagcctatttgactatcgatgagtcaaacgatggtgtcgttggccgctgctcaacgcatctgggccaggttattcgtgatgactataccatgaatcacgcagacgagataaatggaatgtttggtttacgtggtttgggtacaacgagcccattacctttatatgtggagcatgcaagacgtctgactcgtgcgggtttgtaa

SEQ ID NO: 60 - protein, 334 aa, Unknown
  Obtained from an environmental sample.
MFKINRILFSVFVAIMCFMVAPAQADSSGIDRSGKTKYPVVLVHGLSGFDSVFADYFYGVKGALASVGSTEVYTPLITGFNTSEVRGEQLLSYLEDLKAVTGAQKFNLIGHSQGGIDARYVASVRPDLVASVTSVGSPHFGSGTADLVKDSPLEGAAMDIGNAVGALLAAVTGDTSQQVDAMGALEALNSADAAVFNAKYPEGLRQGDCQETPRYNAGSWWWPNWVYDYSVNDGEHNVNGVAYYSWGGTYNPVFNSNVLDLADGLLAAAYLTIDESNDGVVGRCSTHLGQVIRDDYTMNHADEINGMFGLRGLGTTSPLPLYVEHARRLTRAGL

SEQ ID NO: 61 - DNA, 861 bp, Unknown
  Obtained from an environmental sample.
atgaaacagaaattgaatgcagttcgttggttgtcgcccctgttgggattttttgccctgatcatggccgattccgtgtcggcattcagtggcccaagttccgggggcggcggtggggatggtggtttgggcggcggagtgggggcggcacctgtggactatgcccgctctggcagtttcagtgtgacgtccgagcgcggcggcagccagtgcacggtttaccggcccagcaacctcaccggcaatcacgcggtgatcatttggggtaatggcacaggctcatcacccacggcctacgccagcctgttgcggcattgggcgtcctggggctttgtcgtggtggcggccaataccggcagcgccggttcaggtcaggcgatgatcggctgcctggattggttggagtcttcgtcgctgcgctctgccatcaaccgcgacagggttggcacctcggggcattcccagggcggcggcggcgcgatcatggcggccaccgatcggcgcatcaccgcttctgcccctatccagggatacaccgtggggctgggccacagttcgacttcgcactcgcgtcagagcggccccatgctgctgttgtccggcagttccgacactttggtgtcgccacgtctcaatcacgccccggtgttcaaccgcgccaatgtgccggtgttctgggccaacctgcgcggcgccagccattttgagcccacccgcgatggcggtggttacaggggcattaccacggcctggttcctgtatcagttgaacgccgatgcccgcgccgcgcgtgaatttgaaggcgccagctgcggttactgcggcaaccgcagttgggaagtgcagcgcaaaggtttttga

SEQ ID NO: 62 - protein, 286 aa, Unknown
  Obtained from an environmental sample.
MKQKLNAVRWLSPLLGFFALIMADSVSAFSGPSSGGGGGDGGLGGGVGAAPVDYARSGSFSVTSERGGSQCTVYRPSNLTGNHAVIIWGNGTGSSPTAYASLLRHWASWGFVVVAANTGSAGSGQAMIGCLDWLESSSLRSAINRDRVGTSGHSQGGGGAIMAATDRRITASAPIQGYTVGLGHSSTSHSRQSGPMLLLSGSSDTLVSPRLNHAPVFNRANVPVFWANLRGASHFEPTRDGGGYRGITTAWFLYQLNADARAAREFEGASCGYCGNRSWEVQRKGF

SEQ ID NO: 63 - DNA, 1290 bp, Unknown
  Obtained from an environmental sample.
atgcgacgtggatttttccgtggcgcggccgctgcatgcgcggccgtgctggtgggcctgtcggcctgcaccccgctgcccgtgcaggcggccaacaacgacccggtggtgctggtgcacggcttcgccggcttcgggcgcggcgagatgctgggctacaagtactggggcggcctcaccgaccttcagcagacgctcaagggccgctacagcaaccagccggtggtcactgcggtggtggggccgttcagctccaactgggaccgcgcggtcgaactcttctaccagatcaagggcggctgcgtcgactacggcgagcagcattcgcaccagcacggccacctgcgcaagcccgaggaccacttccgcaacggccgcacctgctaccccggcctgcaccgcgactggagcgccgacaagccggtgcacatcgtctcgcacagcatgggcggccagaccgcccgcatgctggtgcagctgctggccggcaacggcgcccccgccaaccccaacctgttcgccggccacgccaccagcgcggcctgggtcaagagcgtcaccaccatcgccacgcccaacgacggcaccacgctggcctaccgcgtggtggactgggtgccggtggtgcagcagctggtcaccggcgtcgccggcctggccaacgccaccggcgccaaccgcatctacgacttcaagatggaccagtggtggatcggcccgcagaccgccggcgaaaccttcgaccagtacgtgcggcgggtcatgacctcgccggtgtggagcagcggcatcaccgacctgtcgccctacgacctgagcccggccggcgcgatggccgccaaccactgggtgaaggaccaccccggcgtcacctacttctcggtgagcaccgacggcagcgagcgcggctgggtgaccggatggtcctacccgcggctggataccaacccgctgatcgggctgttcgccggccccggctggatgggcaactacacccgtgaccaccggccgatgccgccggtggccgacagcagctggtggcccagcgacgcggtggtgaacaccgcggcgcagaaagcgcccacctgggccatggacccgcagggccgtgtctatgcccggccggtggtggtgcgcgacctgcgcagcggcggcacgccccagcgcggcgcctggaactggctgggcctgatggacggcttcgaccacttcgacatcaccggctggacgctgttctgggacagcacgggttggtacaaggcgcacatcgaccgcttgcgggcgctgtag

SEQ ID NO: 64 - protein, 429 aa, Unknown
  Obtained from an environmental sample.
MRRGFFRGAAAACAAVLVGLSACTPLPVQAANNDPVVLVHGFAGFGRGEMLGYKYWGGLTDLQQTLKGRYSNQPVVTAVVGPFSSNWDRAVELFYQIKGGCVDYGEQHSHQHGHLRKPEDHFRNGRTCYPGLHRDWSADKPVHIVSHSMGGQTARMLVQLLAGNGAPANPNLFAGHATSAAWVKSVTTIATPNDGTTLAYRVVDWVPVVQQLVTGVAGLANATGANRIYDFKMDQWWIGPQTAGETFDQYVRRVMTSPVWSSGITDLSPYDLSPAGAMAANHWVKDHPGVTYFSVSTDGSERGWVTGWSYPRLDTNPLIGLFAGPGWMGNYTRDHRPMPPVADSSWWPSDAVVNTAAQKAPTWAMDPQGRVYARPVVVRDLRSGGTPQRGAWNWLGLMDGFDHFDITGWTLFWDSTGWYKAHIDRLRAL

SEQ ID NO: 65 - DNA, 1488 bp, Unknown
  Obtained from an environmental sample.
atgccttattcagcgacattatcagtcaacaccttacttaataaagcagtaaggacactaaaccttacgtctttagctcaagaaaaacgtcagcattcatctgttaactcatcaaataactccttagagaatgttgaaaaagagccattacagataaatactttgcaaataagcactgacgataggcaatcctgcattgatagcgagcccctatccattagagataaagtactgcatcacaatttgctgacgacctatcagccccatttgctgcactatgcaatgaaaagtatcggtctcttgccagagacggtattagacaatctggtcggttatctagatggacctacggctaagcaatatgaacatgttgatgcgcacctgcgcttgattctggcggtgaatagtaagcttaaaactcctttacagctctcagagatgggcgagctgcggaaacgctttgctactgatgctgttgctatgcaaacgccaagagtgtggcaacaggcaagctcttcgttatttgacacgataaaaccttttaccaagaaaaatgagcctagcgtcaattgggaagataagacgattgccaatgcggatgatggcgatatgctggttcgttgttatcaaaagcaagtaaacgcagcaggctttagttttaaaaagaaagccaaacgcaatcctgatgaaaccgtcatgctatttttccatggcggtggtttttgtatcggcgacatcaacacccatcacgagttttgtcatgccgtctgtgagcgaacaggatggccagtggtcagtgttgattatcgcctagcacctgaatatcctgcgcctacgggactaagagattgtattgccgcttatgcttggttggcggataattgctataaatttggggcattagcatcgcgtattgttttggcaggagatagtgcgggcggcggcttatcaaccatgattgcccaacaagtcatcacgccgtctgcaaagtcatggcaagatttaggcgttgatgggcaaaaaacgtttgagatattacagcgcctgccgcagccactggcacaaatgcctttatatcccgtaacggatatcgaaaatgattatccaagctgggagctatacggcgaagggttattgctcgatcatgccgatgtggcagtttttgatgcggcttgtttagaaaatagtccgctgccgcgtcaacatatcttgacgtcgcctatgctcggtgacaatcgccacatttgcccgacctatgtcgttgcagcagaattggacgttttacgtgatgaggcgtttgcatatgccaagcagttagaggattatggtagagctgtccaaacttatacggtctatggtgcgccgcatggctttattcatcttatgagcgtgcaccaaggacttgagcagcaaaccaatcatattattcatggctttgctggctttgtacgtgacgtcatcagtacacaaaatttattagcagcctaa

SEQ ID NO: 66 - protein, 495 aa, Unknown
  Obtained from an environmental sample.
MPYSATLSVNTLLNKAVRTLNLTSLAQEKRQHSSVNSSNNSLENVEKEPLQINTLQISTDDRQSCIDSEPLSIRDKVLHHNLLTTYQPHLLHYAMKSIGLLPETVLDNLVGYLDGPTAKQYEHVDAHLRLILAVNSKLKTPLQLSEMGELRKRFATDAVAMQTPRVWQQASSSLFDTIKPFTKKNEPSVNWEDKTIANADDGDMLVRCYQKQVNAAGFSFKKKAKRNPDETVMLFFHGGGFCIGDINTHHEFCHAVCERTGWPVVSVDYRLAPEYPAPTGLRDCIAAYAWLADNCYKFGALASRIVLAGDSAGGGLSTMIAQQVITPSAKSWQDLGVDGQKTFEILQRLPQPLAQMPLYPVTDIENDYPSWELYGEGLLLDHADVAVFDAACLENSPLPRQHILTSPMLGDNRHICPTYVVAAELDVLRDEAFAYAKQLEDYGRAVQTYTVYGAPHGFIHLMSVHQGLEQQTNHIIHGFAGFVRDVISTQNLLAA

SEQ ID NO: 67 - DNA, 753 bp, Unknown
  Obtained from an environmental sample.
atgaaaaagtataaaacaggcctggttttaagtggtggcggaacacgtggttttgcgcatctgggagtgatagcagctctttacgataagggaattaaacccgacataatttcgggtacaagtgctggtgccattgttggcgcttttattgctgccgggaaaaatccacacgacgttgtggagatttttaaaaagggatcgtttttcaattacacaaaactacagataccccgcgacggtttgatgaaactggatggactgaaggaattgtttcaaaaggaaattcatgtaaaaaacctcgaagagcttgaaatccccctttttattgccatttcgaatttaaataaaggaaccgtggaatacagaaatagcggtcttttgggtgaaactgtgcttgcctcatcttcgatccccatactttttgctccggttttaatcggcgacgatttgtatgttgacgggggattaatggataacattccggttgaacccatcaaactcgattgtgaacaaatcattgtttcaaatatcagtccgattaatcccgttgaaaaaattaaaaatctgattcacattgctactcgtactttttatatgagtgtaaacgccaacatgaaacaggttaaaaaatattccacccattatattgaaccggacggaatagatacttacgaaattttaagccgcacccacgccgatgagttgtatgaacttggatataattcgacaattaaaatcctgaattcgcactaa

SEQ ID NO: 68 - protein, 250 aa, Unknown
  Obtained from an environmental sample.
MKKYKTGLVLSGGGTRGFAHLGVIAALYDKGIKPDIISGTSAGAIVGAFIAAGKNPHDVVEIFKKGSFFNYTKLQIPRDGLMKLDGLKELFQKEIHVKNLEELEIPLFIAISNLNKGTVEYRNSGLLGETVLASSSIPILFAPVLIGDDLYVDGGLMDNIPVEPIKLDCEQIIVSNISPINPVEKIKNLIHIATRTFYMSVNANMKQVKKYSTHYIEPDGIDTYEILSRTHADELYELGYNSTIKILNSH

SEQ ID NO: 69 - DNA, 783 bp, Unknown
  Obtained from an environmental sample.
atgtcagctgaaaaatataaattcggtcttgtcttaagtggtggcggtgcaagaggttttgctcaccttggagtaattgaggccttaaatgaagccggaatatatcctgatataatttccggaaccagcgccggcgctctggccggagtcttatatgctgacggatatactccaaaggaaatcctgaaaatgatgaatgccggcagccgcctcgactttatgcgtccggctttaccacgtgaaggactgctgcagattggcggtgtaatgaaaatactcagaagcaacttacgggcaaaaacttttgaggagctgaaaataccattgtttgtctctgcaacagacctgaataatggaaaagctgagtatttttcggaaggagatttgtttgatccggttatggcatctgcaagtattccggttctttttcaaccggtagttatcaacagtatttgctatgttgatggcggtgttcttgataacctccctctgcgcccgattgaaaataagtgcagtttcctgatcggttcttttgtaaaccccgttggctacctggaaaaaataagcggattgataagtatcgctgaaaggacttttatgctaagcatgtcaaaagaaattatcgaaaaatctaaaagatttgatctttttgttgctccgcaggaattaatgaattttaaaattctcgatccggataaagcagaggagctcttttcggtcggatataatgcaacaaaggaaaagcttgcagaaattgatgtcaagcaacttataaatgaataa

SEQ ID NO: 70 - protein, 260 aa, Unknown
  Obtained from an environmental sample.
MSAEKYKFGLVLSGGGARGFAHLGVIEALNEAGIYPDIISGTSAGALAGVLYADGYTPKEILKMMNAGSRLDFMRPALPREGLLQIGGVMKILRSNLRAKTFEELKIPLFVSATDLNNGKAEYFSEGDLFDPVMASASIPVLFQPVVINSICYVDGGVLDNLPLRPIENKCSFLIGSFVNPVGYLEKISGLISIAERTFMLSMSKEIIEKSKRFDLFVAPQELMNFKILDPDKAEELFSVGYNATKEKLAEIDVKQLINE

SEQ ID NO: 71 - DNA, 750 bp, Unknown
  Obtained from an environmental sample.
atgaaaaaatataaaacaggtttggttttaagtggcggaggaacccgtggatttgctcatttgggagcaattgcggcccttttcgataaaggaataaaacccgatgtaatttcaggaaccagcgccggggctattgcaggcgcttttattgccgccgggaaaaatccgcacgatatacttgaaacatttaaaaagggatcgtttttcaattacacgaagctccagattccgcgcgatggattaatgaaactggatggcttaaaagaattatttcaccgtgagattcctgccaaaaatctcgaagaacttgacatcccattttttgtgaccatttcaaatctaaataaaggtacagttgaatacagaaataccgggccgctgggagaaactgtacttgcctcatcgtcgattcccattctttttgcaccggttttaatcggcaccgatttgtacgttgacggcggattactcgataatattccgatagagcctataaaacacgactgtgatcaaattatcgtttccaatatcagcccgataaatccaacagataaaataaaaaacctgattgaaattgcaacgcgcactttttacatgagtgtgaacgccaatatgaaagaggttcgaaaatacgccggtatttatattgaacctgaaggaattgacaaatacgaaattttaagccgcacccatgccgatgaattgtttgaactggggtacagttcgacacataaaatactgattctttga

SEQ ID NO: 72 - protein, 249 aa, Unknown
  Obtained from an environmental sample.
MKKYKTGLVLSGGGTRGFAHLGAIAALFDKGIKPDVISGTSAGAIAGAFIAAGKNPHDILETFKKGSFFNYTKLQIPRDGLMKLDGLKELFHREIPAKNLEELDIPFFVTISNLNKGTVEYRNTGPLGETVLASSSIPILFAPVLIGTDLYVDGGLLDNIPIEPIKHDCDQIIVSNISPINPTDKIKNLIEIATRTFYMSVNANMKEVRKYAGIYIEPEGIDKYEILSRTHADELFELGYSSTHKILIL

SEQ ID NO: 73 - DNA, 1026 bp, Unknown
  Obtained from an environmental sample.
atgaaaaaatggcttgtttgtttattggggttaatggcactgacagtgcaagcggcagaggggcgtcagcctttttcccgggtcgtgatgtttggtgacagcctctccgacaccggcaagatgtacaagaagatgagggggtatctcccctccagcccgccctacttcaatgggcgtttcagcaacgggccggtctggctggagctgctgcgtgaccagcattttcccggactgctattggccaacgaggcagagggtggggcaacggcggtagcctacaacaagctgggctggcgcaatatttgggcttgggaccccaaatatcaggttatcaacaatctcgattacgagatcgatcagttcctgaaaaaggacaagttccgccccgatgatctggtggtgatctgggttggtgccaatgactatctggcttatggctggaacaaagaacaggatgcggatcgggtgatcgataccatcagattggcatccaaccggttggtgctcaacggtgcgcggcagatcctgctgttcaacatcccggatttggggcaagccccgtccgcccgcagcatgaaggtggtggataaggtgcgtcatgtcgccagctatcataaccagcggctgcagaacctcactcgcgagctggctcccctcggcatcgtgaagttgtttgaggtggacaagcagtttgacgagatggtgcaagacccgcagaaatttggtctgagcgataccgagcacgcctgttttgacggtggttatatgtggaagccgttctcaggcagcgatgctgaagttgctgcggcccctgctttgagcctgccagagaaggtggccatcgcaggtaacccacttttggcgcaggcggtgatgggcccgcaggcaaaagagcgcgcagcgaccctcaactgcaaggaacacatgttctgggatcaggttcatcccaccaaaactgtgcacaaggcattgagccagcgcgtggctgattttatcgaacaaaactacgagttcatccgtcattga

SEQ ID NO: 74 - protein, 341 aa, Unknown
  Obtained from an environmental sample.
MKKWLVCLLGLMALTVQAAEGRQPFSRVVMFGDSLSDTGKMYKKMRGYLPSSPPYFNGRFSNGPVWLELLRDQHFPGLLLANEAEGGATAVAYNKLGWRNIWAWDPKYQVINNLDYEIDQFLKKDKFRPDDLVVIWVGANDYLAYGWNKEQDADRVIDTIRLASNRLVLNGARQILLFNIPDLGQAPSARSMKVVDKVRHVASYHNQRLQNLTRELAPLGIVKLFEVDKQFDEMVQDPQKFGLSDTEHACFDGGYMWKPFSGSDAEVAAAPALSLPEKVAIAGNPLLAQAVMGPQAKERAATLNCKEHMFWDQVHPTKTVHKALSQRVADFIEQNYEFIRH

SEQ ID NO: 75 - DNA, 849 bp, Unknown
  Obtained from an environmental sample.
atgctggacatcaaacttagcggcattgccgctgcactgggcctggcgatctgcgggtctgccttggctgcgccgctgccggatacgcccggcgcgccctttcctgcggtatcgaacttcgagcgctctggcccctacgccacgaccagtcgcagcgaaggcccgaactgccgcgtctaccgtcccagtagcttggggcagaacggcgtccggcatccggtaattctctggggtaacggtaccgggaccgggccgaccgcgtattcgggactgttatcgcactgggccagccacggattcgttgtcgcagcggcggagacgtccaacgccgggactggacgggacatgctggcctgcctcgactacctggtacaagagagcaatcgcacctatggcacttacgttggcgtgcttaacaccggtcgggtcggcacgtcaggtcattcccagggcggcggcggatcgatcatggctgggcaggatgatcgggtgagcgtgaccgcgccaatccagccctacaccatcgggctgggtcatgacccgtcgtcgcagcgaaatcagaaggggccgatgtttttgatgtcaggcgggggcgacaccatcgcgtttccgtacctcaacgcgcagccggtctacacacgggccaatgtgccggtgttctggggtgagcggcgatatgtcagtcacttcgagccggtcggcgacggtggagcctaccgcggaccctcaacggcgtggttccgctatcacctgatggatgatgaaacggcgcgcagcaccttctatggtcgcttctgcgggttgtgcaccagctatctttggaccgagcagcgcaagggaatcgagtaa

SEQ ID NO: 76 - protein, 282 aa, Unknown
  Obtained from an environmental sample.
MLDIKLSGIAAALGLAICGSALAAPLPDTPGAPFPAVSNFERSGPYATTSRSEGPNCRVYRPSSLGQNGVRHPVILWGNGTGTGPTAYSGLLSHWASHGFVVAAAETSNAGTGRDMLACLDYLVQESNRTYGTYVGVLNTGRVGTSGHSQGGGGSIMAGQDDRVSVTAPIQPYTIGLGHDPSSQRNQKGPMFLMSGGGDTIAFPYLNAQPVYTRANVPVFWGERRYVSHFEPVGDGGAYRGPSTAWFRYHLMDDETARSTFYGRFCGLCTSYLWTEQRKGIE

SEQ ID NO: 77 - DNA, 1413 bp, Unknown
  Obtained from an environmental sample.
atgggtatcttcgattacaaaaacttcggacccgagggttccaaggcgttgttcgccgacgctatggcaatcaccttgtacagctatcacaacctggataacggctttgccgtgggttaccagcacaacggcctgggctggggtttgcccgccactttggtcggcgcggtgctcggtggcagcgattcccaaggggtgattccaggcatcccgtggaatccggattcggaaaaggccgccctggatgccgtgcaaaaggccgggtggacgcccataagcgccagcgtcctgggctacgtcggcaaggttgatgcgcggggcacattctttggggaaaaggccggctacaccacggcgcaagtcgaggtgctgggcaagtacgatgacgcgggcaaattgctcgaaatcggcatcggctttcgcggtacgtccgggccacgggaaagcctgatcagcgactccatcggcgatttggtcagtgacctgctggccgcgctggggcccaaggattatgcgaagaactacgccggtgaggcatttggcgggctgctgaaaaatgttgccgactacgccagtgcccatggcctgcacggcgccgatgtgctggtcagcggtcatagcctgggcggcctggcggtcaacagcatggccgacttgagcggcagtcagtggtcagggttctacaaggacgccaactacgtagcctacgcctcgccgacccaaagcagcggcgacaaggtgctcaatatcggctacgaaaatgacccggtgttccgcgcgctggacggctcatcgttcaacctgtcgtcccttggcgtgcatgacaagccccatgagtcgagcaccgacaatatcgtcagcttcaacgaccactacgcctcgaccctgtggaatgtgctgccgttttccatcaccaacctgccgacctggatctcccatctgcccaccgggtatggcgacgggctgacacgggtcgttgaatcgggtttctacgagcagatgacccgcgattccacggtcatcgtcgccaacctgtccgacccggcacgcgccaccacctgggtgcaggacctcaaccgcaacgccgaaccgcacaagggcaataccttcatcattggcagcgacggcaacgacctgatccagggcggcaagggcgcggactttatcgagggtggcaagggcaatgacacgattcgcgacagcagtgggcacaatacctttctgttcagcgggcagtttggccaggaccgggtgatcggctatcaggcgacggacacgctgctgttcaaggatgtgcagggcaatgtgcaataccgggagcagggtggagacacgctgatcagtgtcggcgcggagtcggtgacattggtgggcgtgcacggcttttcgggggaggggattgtgatcagctaa

SEQ ID NO: 78 - protein, 470 aa, Unknown
  Obtained from an environmental sample.
MGIFDYKNFGPEGSKALFADAMAITLYSYHNLDNGFAVGYQHNGLGWGLPATLVGAVLGGSDSQGVIPGIPWNPDSEKAALDAVQKAGWTPISASVLGYVGKVDARGTFFGEKAGYTTAQVEVLGKYDDAGKLLEIGIGFRGTSGPRESLISDSIGDLVSDLLAALGPKDYAKNYAGEAFGGLLKNVADYASAHGLHGADVLVSGHSLGGLAVNSMADLSGSQWSGFYKDANYVAYASPTQSSGDKVLNIGYENDPVFRALDGSSFNLSSLGVHDKPHESSTDNIVSFNDHYASTLWNVLPFSITNLPTWISHLPTGYGDGLTRVVESGFYEQMTRDSTVIVANLSDPARATTWVQDLNRNAEPHKGNTFIIGSDGNDLIQGGKGADFIEGGKGNDTIRDSSGHNTFLFSGQFGQDRVIGYQATDTLLFKDVQGNVQYREQGGDTLISVGAESVTLVGVHGFSGEGIVIS

SEQ ID NO: 79 - DNA, 912 bp, Unknown
  Obtained from an environmental sample.
atgaaaaaatggctattggtgctgctgtgcgccctgcccatgctgggccaggcggcaggttatacccagacccgctaccccatagtgctggtgcacggcctgttcggcttcgacaagctgctcggggtcgactacttctacggcatcccccaggcactgacccgggatggtgccagggtctatgtggcccaggtctccgccacccagagctcggaactgcgcggcgagcagttgctcaaacaggtgcagcaagtgctggccatcacgggagcggagaaggtgaacctcatcggccactcccacggcggccccaccattcgctatgtcgcctcggtcgcccccgagctggtcgcctccgccaccagcgtgggcggggtcaactacggctcggagatcgccgatctggtgcgcgccaacgtggcaccgggctcggtggccgagaagctggcggtggcggctgcctccgccctgtccggggtcatctcgctgctctccgggggcagccagctgccgcaggatcccctcgccgccctcgacgccctcaccagcgccggcgcccaacgcttcaaccagcgctaccctgaggggctgcccagccagtactgcggcgaagggcccatgcaggccgccaacggggtctactacttctcctggagcgggcgcggcaccatgaccaacatcctggatccggtggatccggcgctggcgttgaccagcagcttcttcaaggagcccaacgatggcctggtcggggtgtgcagcagccacctcggcaaggtgatcggcaccgactaccggatgaaccacctggacgaggtgaaccagtcgttcggcattcgccacctgtttgagaccgacccggtcagcctctatcgccagcacgccaaccgcctgcagagactggggttatga

SEQ ID NO: 80 - protein, 303 aa, Unknown
  Obtained from an environmental sample.
MKKWLLVLLCALPMLGQAAGYTQTRYPIVLVHGLFGFDKLLGVDYFYGIPQALTRDGARVYVAQVSATQSSELRGEQLLKQVQQVLAITGAEKVNLIGHSHGGPTIRYVASVAPELVASATSVGGVNYGSEIADLVRANVAPGSVAEKLAVAAASALSGVISLLSGGSQLPQDPLAALDALTSAGAQRFNQRYPEGLPSQYCGEGPMQAANGVYYFSWSGRGTMTNILDPVDPALALTSSFFKEPNDGLVGVCSSHLGKVIGTDYRMNHLDEVNQSFGIRHLFETDPVSLYRQHANRLQRLGL

SEQ ID NO: 81 - DNA, 984 bp, Unknown
  Obtained from an environmental sample.
atgaaaataaaacacattctaggctcgctggtgacagcgctatgtctaacatctacgacaacttatgctactcaagctcaacagatcaaagtctcaagtgtcaaatctgattatgccaaaacgaaatatcctattgtattcgctcatggaatggtcggatttatacgtttgggcactgaaagtctaggcatggattactggtatcaaattttacctgatctagcgagaaacggtgcaaacacatgggcggctaggatgtctcctttcaattcttctgaagtccgaggtgaacaatatgttcaacaacttgaagaagtcatggcgattactggtgctgacaaactcaatctgattggtcatagtcatggtgcaaactctgttcgttatgccgcaggtgtaatgcctgaacatgttgcatcggtgatgactgtagccggtgccaacaaaggtacaatcatcgcgtcagatgtattaaaaatcgcagataaaacaggaacatctgagctactgaatgttctcatcagcacttttggtaaagtcattatgtgggcgcaaggtcttcctgctgatacgttcccacatgatgcgatggccgctggtgtgagtacatctgttgaaggaactgccttgtttaatcaaaaattccctctcggtttaccattaacccactgtggcgaaggtgcttatcaagaaaaaggaattcatttatattcaatgacaggaaacaagccttttacgaatgccttggatctaggtgaccctgtcatggttctacttgaccgtttgtcggttcataaagcaggaaaaaatgatggcatcgttccagtttgtagtgcccattttggtaaaactattcgtgatgactttccgtggaatcatttagatgaggtgaacttgctgttcggaattaaaggattttttgctcctgacccagttgcagtttatagacagcacgccaaccgccttaaattacaaggactttaa

SEQ ID NO: 82 - protein, 327 aa, Unknown
  Obtained from an environmental sample.
MKIKHILGSLVTALCLTSTTTYATQAQQIKVSSVKSDYAKTKYPIVFAHGMVGFIRLGTESLGMDYWYQILPDLARNGANTWAARMSPFNSSEVRGEQYVQQLEEVMAITGADKLNLIGHSHGANSVRYAAGVMPEHVASVMTVAGANKGTIIASDVLKIADKTGTSELLNVLISTFGKVIMWAQGLPADTFPHDAMAAGVSTSVEGTALFNQKFPLGLPLTHCGEGAYQEKGIHLYSMTGNKPFTNALDLGDPVMVLLDRLSVHKAGKNDGIVPVCSAHFGKTIRDDFPWNHLDEVNLLFGIKGFFAPDPVAVYRQHANRLKLQGL

SEQ ID NO: 83 - DNA, 624 bp, Unknown
  Obtained from an environmental sample.
atgaagaagcttttcatgctggcgttgctggcatccatgctgtttgccggccctgccaaagcctgcaatgcagaccctatcgttttcattcatggttattccggctggaaatcccagtttgatgtcatgatcaaccgcttcaggaatgacggcacacccgcctgtgcgatgtacaagttcggttataacagccttggcaatagcaacaagaccagcgccaggcaactgagaaatttcatcaataacattcgtcccaatcacaacaaccgcagggccaacatcatcgcccactccaatggtggcttggtctcccgttggtaccgcgtgtttgagggtggttcttcagccaccaatcgtctggtgacactcggcacccctcatcaaggcaccgcttgggcctatggctgtttcagccccgcctgctttgaaatgcgttataactcgtcgttcctgcaagatctgaatgggcgcggttgtgatgtgtccctgtggtcggcacttgatgagattatcatcccgcagtccaacgcccaatgcggcaacagtcgtcggacatccagtgtggggcatttgacgctgatgatctggaaaggcgtctatgatgatgtaaggcgctacctttaa

SEQ ID NO: 84 - protein, 207 aa, Unknown
  Obtained from an environmental sample.
MKKLFMLALLASMLFAGPAKACNADPIVFIHGYSGWKSQFDVMINRFRNDGTPACAMYKFGYNSLGNSNKTSARQLRNFINNIRPNHNNRRANIIAHSNGGLVSRWYRVFEGGSSATNRLVTLGTPHQGTAWAYGCFSPACFEMRYNSSFLQDLNGRGCDVSLWSALDEIIIPQSNAQCGNSRRTSSVGHLTLMIWKGVYDDVRRYL

SEQ ID NO: 85 - DNA, 987 bp, Unknown
  Obtained from an environmental sample.
atgaaaaacttaaaacttaaattgatacctacgacgttagcattcgtcacaacgctatgcttatcaagctcattcactgcccacgcaggtccgggattactcgaagtaaatgagacaaagatcggtagttatgcaaaaaccaaatatcctattgtgatgacacacggttggttaggctggtctcgcataggcaatgaaacattcaatattgactattggtatcaaatcttacctgatctatcgcgcaatggtgcacgcgtttttgcagcacaactctcacctgctcatacgactgaatttcgaggagaacaattaatttctcaggttgaagaagtaattgcgattactgggcagaaaaaggtcaatctgattggtcattcgcacggcggaccgactgtgcgttatgttgcagcagtaaaacccgactatgttgcttctgttactggtgtaggagggactttcagaggttctatggtcgcagataaaattcaaaataatgaagcaactcgaacaatatttaatattttaggggattacatcattcccccattaattgcttatgcacaaggtcgtcctgatatgccgatcagctttgatgcttcgatgaaatcattaactgaaacaggctctgctgcatttaatcaacgttttccaacaaaagctctcgcgtcaagttgtactcgtttaggcagcccaatagacaacggaatcttttattattcttggactggtgttgcacaaaccaccaacctcttagacatcgataccattttaatgcagctagggcctttagcgtatggcaataaagataatgatggcatggttgggcgctgtagcacgcatattggacgtgtgattcgtgatgattacaaactaaatcataccgatttagctaatatgatgttcggtctcaaaggtttatttgccccagatcctatttcactttatcgccagcatgccaatcgtttgaaactgacaggactctag

SEQ ID NO: 86 - protein, 328 aa, Unknown
  Obtained from an environmental sample.
MKNLKLKLIPTTLAFVTTLCLSSSFTAHAGPGLLEVNETKIGSYAKTKYPIVMTHGWLGWSRIGNETFNIDYWYQILPDLSRNGARVFAAQLSPAHTTEFRGEQLISQVEEVIAITGQKKVNLIGHSHGGPTVRYVAAVKPDYVASVTGVGGTFRGSMVADKIQNNEATRTIFNILGDYIIPPLIAYAQGRPDMPISFDASMKSLTETGSAAFNQRFPTKALASSCTRLGSPIDNGIFYYSWTGVAQTTNLLDIDTILMQLGPLAYGNKDNDGMVGRCSTHIGRVIRDDYKLNHTDLANMMFGLKGLFAPDPISLYRQHANRLKLTGL

SEQ ID NO: 87 - DNA, 1854 bp, Unknown
  Obtained from an environmental sample.
atgggtgtgtacgactacaaaaacttcggtacagccgattccaaagcgttatttaccgacgcgatggcgatcacgctgtattcctatcacaacctggataacggctttgccaccggctatcagcacaacggcttcggccttggcttgccggcgacactggtgaccgcactgatcggcggcgccgactcccagggcgtcattcccggaatcccatggaaccccgattcggaaaaagccgcactggacgcggtgcagaaagccgggtggacaccgatcaccgccacgcaactgggctatgacggcaaggtcgacgcacgcggaacgttcttcggcgaaaagaccgggtacaccagcgctcaggtggaaatcctcggcaagtacgacgcgcagggtcatctcagcgaaatcggtatcgcctttcgcggtaccagcggcccacgggaaagtcagatcagcgactccatcggcgatgtgatcaacgatctgctggcagcactagggcccaaggattatgcgaaaaattacgtcggcgaagccttcggtaatctgctgagcgacgtcgcggcgtttgcccaggctaatggcctgtcgggcaaggacgtgctggtcagcggccatagcctcggcgggttggcggtcaacagcctggcggatttgagcagcggcaagtggaacgggttctaccaggattccaactacatcgcctacgcctcgccgacccaaagcagcaccgataaagtgctgaacgtcggttacgaaaacgacccggtgttccgcgccctcgatggctcctcgttcaacctgtcgtcggtgggcgtgcacgatgccgccaaggtttcgacgaccgataacatcgtcagcttcaacgaccactacgcctcgacggcgtggaatgtgctgccgttttcgatcctcaatataccgacgtggatctcgcacttgccgaccgcctatggcgacggcatgaaccgggtgatcgagtcgaagttctacgacctcaccagtaaagactcgacgatcatcgttgctaacctgtcggatccggcgcgcgccaacacgtgggttcaggacctgaatcgcaacgctgaaacccacaagggcagcacgttcatcatcggcagtgacggcaacgacctgatccagggtggacggggcaacgactatctggaaggccgcgatggcaacgacaccttccgcgacggtggtggctacaacatcttgctgggtggcaagggcaacaacgtgctggatgtgcagcagtcggtgaagaacttcgacttcgccaatgacggcgccggcaacctgtacatccgcgacgccaatggcggcatcagcatgacccgcgacattggcagcattgtgaccaaggaaccgggggttctgtgggggctgttcaaggatgacgtgactcacagcgtcacggccgaaggccttaaggcgggcaacaacgttacccaatacgcgtcaacggtaaagggcggcgccggtgccgatacgctcaaggcacacgctggcggcgattggctgtttggactggacggcaacgaccatttgatcggcagcaccggtaacgacgtgtttgtcggcggggcgggcaatgacgtgttggagtcggggggcgggatcgatacgttcctgtttagcggcgcgtttggtcaggaccgggtggttggctaccaggccagcgataaactggtgtttctcggggttcagggggtgacgccgaacgacgactatcgggcgcatgccacggcggtggggcacgacacggtgctgacgtttgggggggattcggtgacgttggtcggggttgggctggatagcttgtccggctcaggggttgttatcgcctga

SEQ ID NO: 88 - protein, 617 aa, Unknown
  Obtained from an environmental sample.
MGVYDYKNFGTADSKALFTDAMAITLYSYHNLDNGFATGYQHNGFGLGLPATLVTALIGGADSQGVIPGIPWNPDSEKAALDAVQKAGWTPITATQLGYDGKVDARGTFFGEKTGYTSAQVEILGKYDAQGHLSEIGIAFRGTSGPRESQISDSIGDVINDLLAALGPKDYAKNYVGEAFGNLLSDVAAFAQANGLSGKDVLVSGHSLGGLAVNSLADLSSGKWNGFYQDSNYIAYASPTQSSTDKVLNVGYENDPVFRALDGSSFNLSSVGVHDAAKVSTTDNIVSFNDHYASTAWNVLPFSILNIPTWISHLPTAYGDGMNRVIESKFYDLTSKDSTIIVANLSDPARANTWVQDLNRNAETHKGSTFIIGSDGNDLIQGGRGNDYLEGRDGNDTFRDGGGYNILLGGKGNNVLDVQQSVKNFDFANDGAGNLYIRDANGGISMTRDIGSIVTKEPGVLWGLFKDDVTHSVTAEGLKAGNNVTQYASTVKGGAGADTLKAHAGGDWLFGLDGNDHLIGSTGNDVFVGGAGNDVLESGGGIDTFLFSGAFGQDRVVGYQASDKLVFLGVQGVTPNDDYRAHATAVGHDTVLTFGGDSVTLVGVGLDSLSGSGVVIA

SEQ ID NO: 89 - DNA, 1101 bp, Unknown
  Obtained from an environmental sample.
atgtcgaaatcgaagggttatcgcattgttgcctgggcgatcgctgctgctgttgccaacgcgccgctcgtcgtactcctgacacttgccacgccggccggaatcgatcgcgcggttgccgcgacatcgaataccgccagcgacgattacgcggcaacacgctatccgatcatcctcgtacatggccttaccggcaccgacaagtacctcggcgtactcgactactggtacggcattcagtcagacctccagcagcacggtgccaccgtgtacgtggcgaacctttcgggttttcaaagcgacgacggtccgaatggccgtggcgaacagttgctcgcttacgcgaagcaggttctggcggcaaccggtgcgcagaaggtaaacctgatcggtcacagccagggcggcttgacgtcgcgctatgtcgcggcggtcgcgccggaactcgtcgcttcggtgaccaccatcggcacgccgcatcgcggttcggagttcgccgacttcgtgcaggacgcgttgaaaaaagacccgaccggtctttcgacgccgatcatcggcgcctttgcgaatatcttcggcatcctgacgagtagcagtcacaacaccaaccagaacgcggtagccgcgctgcaaacgctgaccacagcgaacgccgccgcctacaacctgcgctatccgagcgcgggtctcggcgcaccgggttcgtgtcaaaccggcgcggcgactgaaaccgtcaacggcaacacgcatctgttgtattcgtgggcgggcagcgcgattcaatccacgtcgatactgggcattccaggtgctaccgacaccagtgtcgcgccgctcgacgccgctaacgtcctcgatccgtcgacgctcgttttatacggcaccggcgccatcatgctgagccgacagtcggggcagaacgacggcctcgtctcggtgtgcagcgcgctctacggcaaggtgctcagtaccagctacaagtggaatcacctcgacgaaatcaaccagttgctcggcgtacgcggcgcgaatgcagcggatcccgacagcctcaagcgggcttatcggcgcatggcgcgtcagtaccaccccgacatcaac

SEQ ID NO: 90 - protein, 367 aa, Unknown
  Obtained from an environmental sample.
MSKSKGYRIVAWAIAAAVANAPLVVLLTLATPAGIDRAVAATSNTASDDYAATRYPIILVHGLTGTDKYLGVLDYWYGIQSDLQQHGATVYVANLSGFQSDDGPNGRGEQLLAYAKQVLAATGAQKVNLIGHSQGGLTSRYVAAVAPELVASVTTIGTPHRGSEFADFVQDALKKDPTGLSTPIIGAFANIFGILTSSSHNTNQNAVAALQTLTTANAAAYNLRYPSAGLGAPGSCQTGAATETVNGNTHLLYSWAGSAIQSTSILGIPGATDTSVAPLDAANVLDPSTLVLYGTGAIMLSRQSGQNDGLVSVCSALYGKVLSTSYKWNHLDEINQLLGVRGANAADPDSLKRAYRRMARQYHPDIN

SEQ ID NO: 91 - DNA, 1425 bp, Unknown
  Obtained from an environmental sample.
atgggtgtgtttgactataaaaaccttggggccgagggctccaaagccttgtttgccgatgccatggcgatcacgttgtatacctaccacaacctggataacggctttgccgtgggctaccagcacaatggcttgggcgtcggcttgccggccactctggtcggcgcattgctcggcagtacggactcccagggagtgatcccaggcattccctggaacccggattcggagaaggccgcgctcgaagcggtgcagaaggctgggtggacgcccatcagcgccagcaccctcgggtataccggcaaggtcgacgcccggggcacgttcttcggcgaaaaggccggctataccacggcccaggtcgaggtgctgggcaagtacgatgacgcgggccagttgcaggaaatcggcatcggttttcgcggcacgtctggcccaagggaaacactgatcaccgactccatcggtgatctggtcagcgacctgcttgcggcgctgggtcccaaggattacgcgaagaactacgccggcgaagcattcggcggcttgctcaagaacgtcgccgagtatgcggcggcccacggtctgagcggccaggatgtgctggtcagcggccatagcctcggcggcctggcggtcaacagcatggccgacttgagcgacgccaagtggtccgggttctataaggacgccaactacttggcctacgcctcaccgacccagagtgccagcgacaaggtgcttaatatcggctacgaaaacgacccggtgttccgcgctttggacggctcatccgccaacctgtcgacgctcggggttcacgacaaaccccacgagtccaccactgacaacattgtcagcttcaacgatcactacgcctcgaccctgtggaatgtgctgccgttttccatcgccaatctgccgacctggatctcgcacttgccgaccggctacggcgacggcatggggcgcattctggagtcagggttctatgaacagatgaaccgggactcgacgattatcgtggccaatctatccgacccggcacgggccaccacttgggtgcaggacttgaaccgcaacgccgaaccgcacacaggcgacacttttatcattggcagcgatggcgatgatctgatccagggcggcaagggcgcggactttatcgaaggcggcaagggcaatgacacgatccgcgacagcagcgggcataacacctttttgttcaacggccagtttgggcaggatcgaattatcggttatcagccgacggataaactcgtgttcgagggtgtggcgggcagcgcggattaccgtgatcacgccaaggtggtgggtggggatacggtgatcagtttcggggcggattcggtgacgttagtgggcgttagcggggtgttgggggagggggttgtgatcggctga

SEQ ID NO: 92 - protein, 474 aa, Unknown
  Obtained from an environmental sample.
MGVFDYKNLGAEGSKALFADAMAITLYTYHNLDNGFAVGYQHNGLGVGLPATLVGALLGSTDSQGVIPGIPWNPDSEKAALEAVQKAGWTPISASTLGYTGKVDARGTFFGEKAGYTTAQVEVLGKYDDAGQLQEIGIGFRGTSGPRETLITDSIGDLVSDLLAALGPKDYAKNYAGEAFGGLLKNVAEYAAAHGLSGQDVLVSGHSLGGLAVNSMADLSDAKWSGFYKDANYLAYASPTQSASDKVLNIGYENDPVFRALDGSSANLSTLGVHDKPHESTTDNIVSFNDHYASTLWNVLPFSIANLPTWISHLPTGYGDGMGRILESGFYEQMNRDSTIIVANLSDPARATTWVQDLNRNAEPHTGDTFIIGSDGDDLIQGGKGADFIEGGKGNDTIRDSSGHNTFLFNGQFGQDRIIGYQPTDKLVFEGVAGSADYRDHAKVVGGDTVISFGADSVTLVGVSGVLGEGVVIG

SEQ ID NO: 93 - DNA, 1272 bp, Unknown
  Obtained from an environmental sample.
atgagacgttcgagcacatggcggcgcgtcctgggcgccgcggtgttgtgggtgggtgcagtgcttccggccttcgcggccaatacatacccggtgatcctggtgcacggcttcgccggcttcggccgcagcgagatgctgggctacaagtactggggcggactgaccgacctgcaggtgcagctgcagggccgctaccccgaccagctggtgcgcaccgcggtggtcgggcccttcagctccaactgggaccgcgcggccgagctgttctaccagatcaagggcggctgcgtggactacggccagatgcacgcgaacaacgcgggccacctgcgcaagccggaagacttcttccacaacgggcggacgtgcttccccggcctttacccgcaatgggatgcgaaccacccggttcacctggtctcgcacagcatgggcggccagaccgcgcgcatgctggtccagatgctcgcggccaacggcgcgccggccaacccgggcctgttcccgtattcggtgaacgccaactgggtgcgcagcgtcaccacgatctcgacgccgaacgacggcaccacgctggcctaccgcatcgtggactgggtgccggtggtgcagcagctggtgaccggcttcgccggcatcgccagcgcgacgggcgccgacaagatctatgacttcaagatggaccagtggaagatcggcgcgcagttgccgaccgagaccttctcggcctacatgaagcgggtgatgagctggccgctgtgggacagcggcatcaccgacctctcgacttacgacctgggccccaacggcgccatggccgagaacgactgggtgaaggaccagcccaacgtctactacttctcgtacagcaccaacgcgagctacagcggcctgtggggatggtcgtacccgacgatcgacgccaacccgctgatcggcgccttcgccgggccgggcttcatgggcaactacacccacgacagccgtcccttcccgccggtgtccgacagcagctactggcccagcgacgcggtggtgaacaccgccgcgcagaaggcgccgacctgggcgatgcactccacgggcgtcgtgtacccgcggccggtgacggtgcgcgacctgagccacggcggcacgccgcaggccggcgcgtggaactggaagggcaacatgcccgactacgaccacttcgacatcatcggctggacgctgttcttcgacagcgtcggctggtacaagtcgcacgtggaccagttgcggggcctgtga

SEQ ID NO: 94 - protein, 423 aa, Unknown
  Obtained from an environmental sample.
MRRSSTWRRVLGAAVLWVGAVLPAFAANTYPVILVHGFAGFGRSEMLGYKYWGGLTDLQVQLQGRYPDQLVRTAVVGPFSSNWDRAAELFYQIKGGCVDYGQMHANNAGHLRKPEDFFHNGRTCFPGLYPQWDANHPVHLVSHSMGGQTARMLVQMLAANGAPANPGLFPYSVNANWVRSVTTISTPNDGTTLAYRIVDWVPVVQQLVTGFAGIASATGADKIYDFKMDQWKIGAQLPTETFSAYMKRVMSWPLWDSGITDLSTYDLGPNGAMAENDWVKDQPNVYYFSYSTNASYSGLWGWSYPTIDANPLIGAFAGPGFMGNYTHDSRPFPPVSDSSYWPSDAVVNTAAQKAPTWAMHSTGVVYPRPVTVRDLSHGGTPQAGAWNWKGNMPDYDHFDIIGWTLFFDSVGWYKSHVDQLRGL

SEQ ID NO: 95 - DNA, 657 bp, Unknown
  Obtained from an environmental sample.
atggtggcgcgaaaacttcctgcacaggcggtcactaagcgctatgggcttcagaccactgcctatggtgaatggctggacatgccgggggttgaatcccggaagactattttatatctgcccggtggcgcgtttctcgtgcgtatgcccaatgcgcaccggcaattggtcggtcgtctgtgtaccgcgattcaggccaatgcggcaatcgtccactatcgtctcgctccggaaaacctttttccggcggcactggaagatgcattgaagacctaccgtcagttacttgccaatggctccgctcccgaagacatcatcctgatgggcgattcggcaggtggcggtttggctctatctacagcactggccttgcgtgacgccggagaacccatgccgtcagggatcgttgttatgtcgccattggcggacttgacctactcaggtgagtcacgccagcgccataggtggaaggacccgctgttgccggtctcaaggaaccagggagatgcacgttactatttgggtaaccatgacccgtcagacccactggcttcacccatttttggcgactattccgacctaccccctatcctgttgcagacaggatcattccgaaagatcgcgagcgagcccaggacaacgtcaccaaaatattga

SEQ ID NO: 96 - protein, 218 aa, Unknown
  Obtained from an environmental sample.
MVARKLPAQAVTKRYGLQTTAYGEWLDMPGVESRKTILYLPGGAFLVRMPNAHRQLVGRLCTAIQANAAIVHYRLAPENLFPAALEDALKTYRQLLANGSAPEDIILMGDSAGGGLALSTALALRDAGEPMPSGIVVMSPLADLTYSGESRQRHRWKDPLLPVSRNQGDARYYLGNHDPSDPLASPIFGDYSDLPPILLQTGSFRKIASEPRTTSPKY

SEQ ID NO: 97 - DNA, 1854 bp, Unknown
  Obtained from an environmental sample.
atgggtgtgtttgactacaagaacttcactgcaagtgactccaaggcgctgttttccgatgcgctggcgatcaccctgtactcctaccacaacatcgacaacggctttgccgagggctaccagcacaacggcttcggcctgggcctgccggcgaccctggtcacggcgctgatcggcagcggcaattcccagggggtaatccccggcattccctggaaccccgactccgagaaggccgcgctggatgccctgcaccaggccggctggtccaccatcagcgcccagcaactgggctacgacggcaaggtcgatggccggggaaccttctttggcgagaaggccggctacggcacggcccaggtggaaatcctcggcaagtacgatgcccagggccacctggagtccatcggcattgcctttcgcggcaccagcgggccacgggaatcggtgatcagtgacaccatcggtgatgtgatcaacgacctgctggcggccctggggcccaaggactatgcgaagaactatgccggcgaggcgttcggcaagttgctgggagatgtcgccgcctttgcccaggccaatggcctgtcgggcaaggatgtcctggtcagcggccacagcctgggcgggctgggggtcaacagcctggcggacctgagcagcgaacgctggtcggggttctacaaggactccaactacatcgcctacgcctcgccgacccagagcgccagcgacaaggtgctgaacatcggctacgagaacgacccggtgttccgcgccctggacggctcaaccttcaacctgtcgtccctcggggtgcatgacgcccaccaggactcggcgaccaacaacatcgtcaacttcaacgaccattacgcctcgaccctgtggaatgtgctgccgttctcgatcctcaacattcccacctggctctcccacctgcccaccggctacggcgacggcctgtcccgggtgctggaatcgaagttctacgacttcaccagcaaggactccaccatcgtggtagccaacctgtcggacccggcccgggccagtacctgggtccaggacctcaaccgcaatgccgagacccacaagggcagcaccttcatcatcggcagcgacggcaacgacctgatccagggcggcagcggcaacgactacctggaaggccgggccggcaacgatacgttccgcgacagcggcggctacaacatcatcctcggcggccagggcagcaacaccctggacctgcagcagtcggtcaagaactacagctttgccagcgacggcgccgggaccctgtacctgcgtgacgccaatggcggtatcagcatgacccgcgacattggcgcgatccagagcaaggagccgggctttctctggggcctgttcaaggatgatgtgatccaccaggtcaccgaccagggcctcaaggccggcgggcagcttacccagtacgcctcgtcggtcaggggcgatgcgggcgacaacgtgctcaaggcccatgccggcggcgactggctgttcggcctggacggcaacgaccacctgatcggcggccagggcaacgacgtgttcgttggcggtgccggcaacgacctgatggaagccggaggcggcaacaatacctttctgttcaccgggcatttcggccaggaccgcatcctcggctaccagggtggcgacaagctggtgttcatgggggtgagcggcgtgctgccggaccaggactatcgggctcatgccagcagcagtggtaacgacacggtgctgaccttcggccaggactcggtgaccctggtgggggtcagcctggagcacctcaacggttccggcatcgttctcgcctga

SEQ ID NO: 98 - protein, 617 aa, Unknown
  Obtained from an environmental sample.
MGVFDYKNFTASDSKALFSDALAITLYSYHNIDNGFAEGYQHNGFGLGLPATLVTALIGSGNSQGVIPGIPWNPDSEKAALDALHQAGWSTISAQQLGYDGKVDGRGTFFGEKAGYGTAQVEILGKYDAQGHLESIGIAFRGTSGPRESVISDTIGDVINDLLAALGPKDYAKNYAGEAFGKLLGDVAAFAQANGLSGKDVLVSGHSLGGLGVNSLADLSSERWSGFYKDSNYIAYASPTQSASDKVLNIGYENDPVFRALDGSTFNLSSLGVHDAHQDSATNNIVNFNDHYASTLWNVLPFSILNIPTWLSHLPTGYGDGLSRVLESKFYDFTSKDSTIVVANLSDPARASTWVQDLNRNAETHKGSTFIIGSDGNDLIQGGSGNDYLEGRAGNDTFRDSGGYNIILGGQGSNTLDLQQSVKNYSFASDGAGTLYLRDANGGISMTRDIGAIQSKEPGFLWGLFKDDVIHQVTDQGLKAGGQLTQYASSVRGDAGDNVLKAHAGGDWLFGLDGNDHLIGGQGNDVFVGGAGNDLMEAGGGNNTFLFTGHFGQDRILGYQGGDKLVFMGVSGVLPDQDYRAHASSSGNDTVLTFGQDSVTLVGVSLEHLNGSGIVLA

SEQ ID NO: 99 - DNA, 876 bp, Bacteria
atgtatattgacggtgtgttttccggcggaggagtaaaaggcattgcgctcgcaggcgcttatgaagtgcttgaggaaaaaggcttccgctttaaaagagttgcgggtacaagcgccggcgccattattgccgctttcattgcgtcaggttacaccagtaaggaaatccatgctttaattgaagaagtggacggagagaaattgctggatcagaggtactcatttctccccttaaagatgctccagtgggtgtccatctactggcgtcttggcttatacaaaggcgatacgatagaaaaatggattgctgatctgttaagagcgaaaggcataagggttttcggcgatttgcagaaagggtctctgcgccttattgcttctgatctgacaaacggcaccatgattgttttgccggacgatttggcccgttacgggttaaatccagatatgttcccggttgccagagcggtcagaatgagctgcagcattccgtatttctttgaaccgataaaattaaaaacggacacaggcaccgccacggttgtcgacggaggcgtgttaagcaattttccaatctggctgttttcaaaggaaagaaagcgccctgtgatcggtgtcacgcttgcgccgcgtgaaagagagcgtccgaaaaaaaatatccgcaacgcttttgaactgttcggcgccctgtttgaaacgatgaaggatgctcatgacgcaaggcacattgcgtcacgctatgaacaaaatatcatttttctccctgttgatgacgtaatggccactgattttcatttaacacaacaaaaaaaactagccctgattgagctaggtaaaagacggacagagctgtttttaaagcagtggacctattaa

SEQ ID NO: 100 - protein, 291 aa, Bacteria
MYIDGVFSGGGVKGIALAGAYEVLEEKGFRFKRVAGTSAGAIIAAFIASGYTSKEIHALIEEVDGEKLLDQRYSFLPLKMLQWVSIYWRLGLYKGDTIEKWIADLLRAKGIRVFGDLQKGSLRLIASDLTNGTMIVLPDDLARYGLNPDMFPVARAVRMSCSIPYFFEPIKLKTDTGTATVVDGGVLSNFPIWLFSKERKRPVIGVTLAPRERERPKKNIRNAFELFGALFETMKDAHDARHIASRYEQNIIFLPVDDVMATDFHLTQQKKLALIELGKRRTELFLKQWTY

SEQ ID NO: 101 - DNA, 675 bp, Unknown
  Obtained from an environmental sample.
atgaatcaagccctggaaaccatcgagatcgcgaccggtgacgcacccggcgcgagcatcatctggctgcatggactcggcgccgacggcaatgacttcgtgccgatcgtcgaggagctcgatctgccccgcggcgtggacattcgcttcgtgttcccgcacgcgccgatgattccggtcaccgcgaacggcggttatgtgatgcgcgcctggtacgacatcaacctcgatggccccgaacggcggccggacgcggtcggtctgcgcgcctcgggcgcggcgatcgaacaactcctagcgcgcgagcgcgaacgtggcatcgcggcggaacgcatcgtgttggccggcttttcccagggcggcgccgtgacgctgcagaccggtctgcgccactccgaacgcctcgccggattgatggtgctgtcgagctatctgccgctgcccgaaacggtggcggccgaagcggctccggcgaacgcgccggtgccgatcttcttcgcgcatggtcagtacgatccggtgatcccgatccagcgcgcagaacgctcgcgtgttcatctggagcaactcggctacgcggtcgaatggcacagctacccgatgcagcactcgttgtgcgcccagcagatcgtcgatatcgggcgttggttgcagaaagtgctgcctgcgtcctga

SEQ ID NO: 102 - protein, 224 aa, Unknown
  Obtained from an environmental sample.
MNQALETIEIATGDAPGASIIWLHGLGADGNDFVPIVEELDLPRGVDIRFVFPHAPMIPVTANGGYVMRAWYDINLDGPERRPDAVGLRASGAAIEQLLARERERGIAAERIVLAGFSQGGAVTLQTGLRHSERLAGLMVLSSYLPLPETVAAEAAPANAPVPIFFAHGQYDPVIPIQRAERSRVHLEQLGYAVEWHSYPMQHSLCAQQIVDIGRWLQKVLPAS

SEQ ID NO: 103 - DNA, 786 bp, Unknown
  Obtained from an environmental sample.
atgggcgacccgattgtgcttgtgcacggtattttagggttcaaccagatagttgtcggcggtacgaatgtcacgacgtactttcgtgacattcgcgacgctcttatcgaagacggtcatactgtgcccgtgccgccacggctcgatccgactggctccattaagaaacgcgcacacgacctcaagggatatctggagacaaacggagacgttagcggtcgccgggtgcatcttgtggcgcacagtatgggcggccttgattcacgatttctgatttccagactcggcatggaaaaccgggtgttgtcgctgacgacgattggcactccgcaccacggaagtccgatcgcggatttcgtgatgtcgcatacgcatccggcgttggcctcggtttttgaattattgggtgtgcaaggcgttgatgatttgacgagccacagctgtgaacagttcaatcaggattgccccgagtctccgcgcgtgcgctatcgctcggtgggaggaagctatcagccagacagcgtacttgtggcgccgtttgaaatcctgaggctgactcgcgacctgatgcaaaaggattttggagacaacgacgggttggtcccgctcgagtcggcgaagtttggctcggatgcgacgaggtgggaatatcgcggagcttggcctgcaaatcacttccggctggtcaactggggcacgaatatcgcaataactccgaaagaatgtggagacaattggatcgtcgacaaataccgtgagcttgtggcagatatcgtgcaaccttag

SEQ ID NO: 104 - protein, 261 aa, Unknown
  Obtained from an environmental sample.
MGDPIVLVHGILGFNQIVVGGTNVTTYFRDIRDALIEDGHTVPVPPRLDPTGSIKKRAHDLKGYLETNGDVSGRRVHLVAHSMGGLDSRFLISRLGMENRVLSLTTIGTPHHGSPIADFVMSHTHPALASVFELLGVQGVDDLTSHSCEQFNQDCPESPRVRYRSVGGSYQPDSVLVAPFEILRLTRDLMQKDFGDNDGLVPLESAKFGSDATRWEYRGAWPANHFRLVNWGTNIAITPKECGDNWIVDKYRELVADIVQP

SEQ ID NO: 105 - DNA, 1854 bp, Unknown
  Obtained from an environmental sample.
atgggtgtgtatgactacaagaacttcggcacagccgactccaaggcactgttcagcgatgccatggcgatcacgctgtattcctatcacaacctcgacaacggttttgccgctggctatcagcacaacggtttcggtatcggcctgcccgccaccctggtcaccgcgctgattggcggcaccgattcacaaggcgtgatccccggtattccatggaatcccgactcggaaaaactcgccctcgatgcggtaaaagcggctggctggacgccgatcaccgcctcgcaactgggctacgccggcaagaccgatgcccgcggaaccttctttggcgagaaggccggctacaccagcgctcaggttgaaatcctcggcaaatacgacgcccaggggcatctcacggaattaggcatcgccttccgtggcaccagcggcccgcgagaaatcctcatcggcgactcgattggcgatgtgatcaacgatctgctcgccgcgtttggtcccaaggattacgcgaagaattacgtcggtgaagcattcggcaacctgctcaatgacgtcatggcgtttgccaaggccaacggcctgaccggcaaagacgtgttgatcagcggccacagcctcggcggattggcggtcaacagcatggcggatttgagtggcggcaagtggggcggcttcttcgctgactccaactacatcgcctacgcctcgcccacacaaagcagcaccgacaaagtcctcaatgtcggctacgaaaatgacccggtgtttcgtgcgcttgacggctcgaccttcaccggcgcctcggtcggcgtgcacgacgcaccgcacgcctcgaccaccgacaacatcgtcagcttcaacgaccactacgcctcaaccgcgtggaacctgctgccgtactcgatcctgaatattccgacgtggatttcgcacctgccgaccgcttatggcgacggcatgaaccgggtcatcgaatcgaagttctacgacctgaccagccgcgactcgacgattattgtcgccaacctgtccgacccggcgcgcgccaacacctgggtgcaggatctcaaccgcaacgccgacccgcacaagggcagcacgttcatcatcggcagcgatggcaacgacctgatccagggcggcagcggcaatgactatctcgaaggccgcgccggcaacgacagcttccgcgacggcggcggttacaacatcattctgggcgggcagggcagcaataccctcgatttgcagaagtcggtcaacacgtttgactttgccaatgatggcgccggcaatctgtacatccgcgatgccaatggcgggatcagcatcacccgtgacatcggcagcatcgtcaccaaggagccggggttcctctggggtctgttcaaggatgacgtcacccacagcgtgaccgcgagcggtttgaaagtcggcaacaacctcaccgcttacgaatccagcgtcaaaggcagcagcggtgccgacacgctcaaggcgcacgccggcggcgactggttgtttggcctcgacggcaacgatcacctgattggcggcagcggcaacgacgtgtttgtcggcggcgccggcaatgacttgatggaatcggggggcggggcggacacgttcctgttcaacggtgcgttcgggcaggatcgagtgctcgggttcacgtccaacgacaaactggtgttcctcggtgtgcagggcgtgttgccgaccgacgacttccgcgcccatgcctcgacggtagggcaggatacggtgctgacgttcggcaatgattcagtgacgctggtcggggtttcgctcaacagcctgagcgccgacggcatcgtcatcgcctga

SEQ ID NO: 106 - protein, 617 aa, Unknown
  Obtained from an environmental sample.
MGVYDYKNFGTADSKALFSDAMAITLYSYHNLDNGFAAGYQHNGFGIGLPATLVTALIGGTDSQGVIPGIPWNPDSEKLALDAVKAAGWTPITASQLGYAGKTDARGTFFGEKAGYTSAQVEILGKYDAQGHLTELGIAFRGTSGPREILIGDSIGDVINDLLAAFGPKDYAKNYVGEAFGNLLNDVMAFAKANGLTGKDVLISGHSLGGLAVNSMADLSGGKWGGFFADSNYIAYASPTQSSTDKVLNVGYENDPVFRALDGSTFTGASVGVHDAPHASTTDNIVSFNDHYASTAWNLLPYSILNIPTWISHLPTAYGDGMNRVIESKFYDLTSRDSTIIVANLSDPARANTWVQDLNRNADPHKGSTFIIGSDGNDLIQGGSGNDYLEGRAGNDSFRDGGGYNIILGGQGSNTLDLQKSVNTFDFANDGAGNLYIRDANGGISITRDIGSIVTKEPGFLWGLFKDDVTHSVTASGLKVGNNLTAYESSVKGSSGADTLKAHAGGDWLFGLDGNDHLIGGSGNDVFVGGAGNDLMESGGGADTFLFNGAFGQDRVLGFTSNDKLVFLGVQGVLPTDDFRAHASTVGQDTVLTFGNDSVTLVGVSLNSLSADGIVIA

SEQ ID NO: 107 - DNA, 861 bp, Unknown
  Obtained from an environmental sample.
atgaccagggtgtggcggcaccacgaccggaggtcactcgacgcccaattcatcctcgattcggtcccgaacctcgagagcctgttcgcccgtcggctcgagcggagtgcccgagcgcgggagcgcttccgaccgctgacggtccgctacggcgagggcccgggcgagacgctggacgtctacgccgcgggtacgcggacgcccgtgcaggtcttcatccacggcggcttctggcgctcgctcgatgccgcgaccttcgccttcctcgccgacgccttcgtccccgccggcgccatgctggtggtgatcgactacccgctgatccccgaggtcgagctcgctgccatcgtcgccgcctgcgagcgcgccatcgcctggaccttccgcaacgccgccgggcatggcggcgatccggggcgcatccacatctccggcaactcggccgggggacacctggtggcgctcttgatggaccgcgcctggccagcgcggcacggcctgcccggggacgtggtcgccggcggctgcgcgatcagcggcctcttcgacctcgagccggtgcgcctgagcgcccagaacgagacgctggcgctgaccgagcgcgaggtcgccgtgctcagcccgcttcgccgcctgccggcggccgccgggccgctgatcgtcgccgtcggcggcgccgagaccgaggagttccggcgccagagccgcgactacgcgcaggcttggcgcgccgccggcctcgcgggcgaggagctggtggtcccgggcgccaaccacatcgacatcgtcctcgaccatctcggcgaccggggctccccgctgcacgtcgccgtccgccgccagatgggcctcgccggctga

SEQ ID NO: 108 - protein, 286 aa, Unknown
  Obtained from an environmental sample.
MTRVWRHHDRRSLDAQFILDSVPNLESLFARRLERSARARERFRPLTVRYGEGPGETLDVYAAGTRTPVQVFIHGGFWRSLDAATFAFLADAFVPAGAMLVVIDYPLIPEVELAAIVAACERAIAWTFRNAAGHGGDPGRIHISGNSAGGHLVALLMDRAWPARHGLPGDVVAGGCAISGLFDLEPVRLSAQNETLALTEREVAVLSPLRRLPAAAGPLIVAVGGAETEEFRRQSRDYAQAWRAAGLAGEELVVPGANHIDIVLDHLGDRGSPLHVAVRRQMGLAG

SEQ ID NO: 109 - DNA, 1575 bp, Unknown
  Obtained from an environmental sample.
atgcgcaagatagtgctgctgttgatcctgctgaccgggctggcgcccaccgcctgggcggccacggtcaagaccacccaccgcaccattcccagctgggatggaacgcctctcggggccttcgtcatcgaaccgcaggacgcgggcagtggccgctatccgctgctggtgatgcccagcagctgggcagttccaagcgtggaatatgtgggcgtggcacagtcattggcgcgacgtggctacgtggtcatcagctacagttcgcgcggcttctgggaatcgggcggcgccatcgacattgccgggccggccacggtcgaagatgtcagcgccctgatcgactgggcgctggacaacacccaggctgatccgtcgcggatcggcgtctccggcatctcctacggcgccggcaccagcctgctggcggcggcgcgcgacccgcgcatcaaggcggtagcggccctgagcggttgggccgacctgcaggcttcgctgtacagcaacgacacccccagcgcacagggcatcgccctactggtggcggccgggctggccacgggccgcccaggtgcggagctggccacgatcaaccgcagcgtgctgctcggtaactaccagggtgcggtggactcgctgttgccggttgcggctcaacgcagccctggcgccagcatcgacgagatcaatgccaaccaaccggccgttttcctggccaacgccttcaacgacagcctgttcccgccgggccagctggtggatttcttcaatcgcctgaaggggcccaagcagctgcagctgcgccacggtgaccatgcgctcaacgaggccttcggggcgttgggtattcccaatgaggtctatgaccaggtgggggcgtggttcgatcactacctgaaaggcgcgtccaatgggatcgagcgccaggccgcagtgcagttgaagtcgcagaagggcagctggagccgctatccggactggcaggcaaccaacagtggtgccgtcagttacgggctgaccgcaccgggtggcctgctgctgcccaccggtggcctggcagagaacgggcgcactacgggatggaactatcgcatcggcagtggcctgctgacggccgccaactccggcatcgcgatggcgtctggcgcgctgcagatgatcaatctgccaccgggggcctatgtgccgttcgtgggacgcaatgccgccggtgtctggcaggggccgatctactggagcgcacggcgcctggatggtgcccccgaagtgcgcgtgaccgtcacccccagccgcgccaacaccacgctgtatgcctacctgtatgcggaagacgtgctgggcaatggccagctgatcagccacaagccctacacgctgcgcggtgccacgccgggccagccgaagacgctcgacctgcgcctggaagcaagcagctggaacattccggccggcagccgcctgaccctggtcgtcgatacggtggatctgcgctatgcgggcatcagccagctgggtggtgcggtgaccttcagttcgccggccaatgcaccttcggtattgaaggtgccgttgcattga

SEQ ID NO: 110 - protein, 524 aa, Unknown
  Obtained from an environmental sample.
MRKIVLLLILLTGLAPTAWAATVKTTHRTIPSWDGTPLGAFVIEPQDAGSGRYPLLVMPSSWAVPSVEYVGVAQSLARRGYVVISYSSRGFWESGGAIDIAGPATVEDVSALIDWALDNTQADPSRIGVSGISYGAGTSLLAAARDPRIKAVAALSGWADLQASLYSNDTPSAQGIALLVAAGLATGRPGAELATINRSVLLGNYQGAVDSLLPVAAQRSPGASIDEINANQPAVFLANAFNDSLFPPGQLVDFFNRLKGPKQLQLRHGDHALNEAFGALGIPNEVYDQVGAWFDHYLKGASNGIERQAAVQLKSQKGSWSRYPDWQATNSGAVSYGLTAPGGLLLPTGGLAENGRTTGWNYRIGSGLLTAANSGIAMASGALQMINLPPGAYVPFVGRNAAGVWQGPIYWSARRLDGAPEVRVTVTPSRANTTLYAYLYAEDVLGNGQLISHKPYTLRGATPGQPKTLDLRLEASSWNIPAGSRLTLVVDTVDLRYAGISQLGGAVTFSSPANAPSVLKVPLH

SEQ ID NO: 111 - DNA, 1851 bp, Unknown
  Obtained from an environmental sample.
atgcccgtattcgattaccgacagctcgacagcactgcctcctctgcgctgtacaaggacgccatggcgctggccacctacgcctaccatggcatcgacgacggcttcagcgccggctaccagaagtacggcttcggccttggcctgccagccacgctggtcaaggcgctgatcggcggcaccgacagccagggcgtgatccccggcatcccctggaaccccgactccgaagcgcgggccctggcccaggtcaaggccgccggctggtcgccgatcagcgcggcgcaactgggttaccagggcaagaccgacgcccgcggcaccttccacggcgaagcgccgggctacacctcggcgcaggtggagatcctcggccgctacgatgccgccggccagctcagtggcatcggcatcgcttttcgtggcaccagcggcccgcgcgagaacctgctgggcgacaccattggcgatgccatcaatgacctgctggcggcgatcggcccggcaggctatgcccgtgattacgccggcaacgcattcgggcaactgctcgccgatgtagcggcctttgccaaggccaacggtctgagcggcgcggatatcaccgtcagcggtcatagccttggcggcctggcggtcaacagcctggccgacctgagcggctcgcgctggggtggtttctatcaggatgcgcgctacgtcgccttcgcctcgccgacccaggccgccgacgccagcaaggtgctcaatatcggctacgagaacgacccggtgttccgcgcgctcgacggcacttcggcgacctggagcaccctgggcgtgcacgacggcgccaaggcctcggccaccaacaacatcgtcaacttcaatgaccactacgcgtccgatgcctggaacctgctgccgttctccatcggcaacatcgccacctggctgtcgcacctgccaacggcctacaccgacggccttgggcgtgtgctggactcatctttctatcagtggaccagccgcgactcgaccgtcgtggtcagcaacctgtccgacgtgacccgtggctcgacctgggtcgaagatctcaaccgcaacgccgagcagcacaagggcagcacgttcattatcggctcggacaaggacgacctgatccatggcgggcgcggcaacgactacctcgaaggccgggccggcaacgataccttccgcgatgacggcggtttcaacctgatcgacggcggcgccggccatgacaccctgaggctgcaggatgccctggccaacctgagcattgcccgggatggcgagggcacgttgtacgtgcgcgacgccgggggtggcatcagcctggtgcgcaatgtcgaaaacctggtgagcaaggagtcgagcctgctgatcttcagcaaggaagtcagtcacgcggtggcggcgcaggggctgttcgagagcggcaagatcaccccctatgcgtcctcgctcaacggcacccaggcaggcgaccagctggtagcgggaaatcagggccaatggctgttcggcctgggcggtgacgaccggctgcagggcggcgcgggcaatgacgtgctggttggcggcgcgggcaacgatgtgctgatgggtggcgctgggcgcgacaccttcctgttcagcggccatttcggccaggaccgggtgctggatttcaccggccaggatcggctggtgttcattggcgtggacggtggcaccgcagcgccggattggcgtgcccatgccagccaggtgggggaagacctggtgctgaagttcggcggggacagcgtgacgctggtggggattgcggggcagggggttggggatgggcagatcgtgattgcctga

SEQ ID NO: 112 - protein, 616 aa, Unknown
  Obtained from an environmental sample.
MPVFDYRQLDSTASSALYKDAMALATYAYHGIDDGFSAGYQKYGFGLGLPATLVKALIGGTDSQGVIPGIPWNPDSEARALAQVKAAGWSPISAAQLGYQGKTDARGTFHGEAPGYTSAQVEILGRYDAAGQLSGIGIAFRGTSGPRENLLGDTIGDAINDLLAAIGPAGYARDYAGNAFGQLLADVAAFAKANGLSGADITVSGHSLGGLAVNSLADLSGSRWGGFYQDARYVAFASPTQAADASKVLNIGYENDPVFRALDGTSATWSTLGVHDGAKASATNNIVNFNDHYASDAWNLLPFSIGNIATWLSHLPTAYTDGLGRVLDSSFYQWTSRDSTVVVSNLSDVTRGSTWVEDLNRNAEQHKGSTFIIGSDKDDLIHGGRGNDYLEGRAGNDTFRDDGGFNLIDGGAGHDTLRLQDALANLSIARDGEGTLYVRDAGGGISLVRNVENLVSKESSLLIFSKEVSHAVAAQGLFESGKITPYASSLNGTQAGDQLVAGNQGQWLFGLGGDDRLQGGAGNDVLVGGAGNDVLMGGAGRDTFLFSGHFGQDRVLDFTGQDRLVFIGVDGGTAAPDWRAHASQVGEDLVLKFGGDSVTLVGIAGQGVGDGQIVIA

SEQ ID NO: 113 - DNA, 915 bp, Unknown
  Obtained from an environmental sample.
atgacaaaacgcttctggaagtacctcgcggtctgcctgatcgccctgacctccctgcccgcgccatcctgggcggccggctacacgcaaaccaaatacccgatcgtgctggtgcacggcctgttcggcttcgacaacatcggcccggtcgactacttctacggcatcgcctcggggttgcgcagcggcggcgccaatgtgtatgtgacgtcggtgtcggccgccaacagcaccgaggtgcgcggcgagcagctgctggtgcaggtcaagcagatcctggccgcgaccggcgcttccaaggtcaacctgattggccatagccacggcggccccaccgcgcgttatgtggcgtcggtgcggccggacctggtggcttcggtcagcagcgtcggtggcgtcaacaagggctccagagtggccgatgtgctgatcggcgcggtgccggacgtgacctacagcctggccaacgcggtctccggatttatcagcttcctgtccggcagcccgaccttgccgcagaatgcgcgcgcggcggccacctcgctgagcaccgccggcacgctggccttcaacggcaggcatcccgaaggcgtgccgacgtcggcctgcggcgagggcgactaccaggtgcgcggcgtgtactacttctcgtggagcggcgcgcagccttacaccaatctgctggacgccagcgatccggtgctggccctgacggcgatcgccttcaacggcgccaagaacgatggcctggtcagcagctgctccagccacctgggccgggtgatccgcgacgactatgcgatgaaccatctggacgaagtgaatcagctggtgggcatcaccaacctgttcgagaccagcccggtgaccatcttccgccagcaggccaatcgcctgcagggactgggactgtaa

SEQ ID NO: 114 - protein, 304 aa, Unknown
  Obtained from an environmental sample.
MTKRFWKYLAVCLIALTSLPAPSWAAGYTQTKYPIVLVHGLFGFDNIGPVDYFYGIASGLRSGGANVYVTSVSAANSTEVRGEQLLVQVKQILAATGASKVNLIGHSHGGPTARYVASVRPDLVASVSSVGGVNKGSRVADVLIGAVPDVTYSLANAVSGFISFLSGSPTLPQNARAAATSLSTAGTLAFNGRHPEGVPTSACGEGDYQVRGVYYFSWSGAQPYTNLLDASDPVLALTAIAFNGAKNDGLVSSCSSHLGRVIRDDYAMNHLDEVNQLVGITNLFETSPVTIFRQQANRLQGLGL

SEQ ID NO: 115 - DNA, 705 bp, Unknown
  Obtained from an environmental sample.
atggtgaagcgtaggttgaaagtgcgcgccgcagcgtctcgcgcaccggcgctgactacggcattcggctcggccgtgctggccgcaaccctgttttcgctgcccttcccggcctttgcggccaacgcgccggaacaggccaggccggtgatcgtcgtgctcggcgacagcatctccgccgaatacggcttgccccgcgacactggctgggttgccctgatgcgccagcgtctcaccgacgagcgaatcgattatagcgttgccaacgcgagcatcagcggcgacaccacgagcggcggccgggcccgcttgccggcgcttctgcagcgcctcaagccgagcatcgtgatcgtcgagcttggcgccaacgatgccttgcgcggcgtgccgctcgccacgaccgaagacaatctgcgcacgatcatcgagcaggctcaacaaagccatgcgaaagtcgtgctggtcggcatgtatgtgccacccaattacggccccgactacacgcaaaagttccatggtctgtacggcgaactctcgaagcaattgcgagtgccgctagtgcctttcctgctcgccggcatcgccgacaaaccggacatgttccaggcggatcagatccatcccacgcagcaggcacagccaatgctactcaacaacgtgtggccggctgtcaagccactccttcgcacaagttcgccgcactga

SEQ ID NO: 116 - protein, 234 aa, Unknown
  Obtained from an environmental sample.
MVKRRLKVRAAASRAPALTTAFGSAVLAATLFSLPFPAFAANAPEQARPVIVVLGDSISAEYGLPRDTGWVALMRQRLTDERIDYSVANASISGDTTSGGRARLPALLQRLKPSIVIVELGANDALRGVPLATTEDNLRTIIEQAQQSHAKVVLVGMYVPPNYGPDYTQKFHGLYGELSKQLRVPLVPFLLAGIADKPDMFQADQIHPTQQAQPMLLNNVWPAVKPLLRTSSPH

SEQ ID NO: 117 - DNA, 1047 bp, Unknown
  Obtained from an environmental sample.
atgcgagcagtttgcgacgaggcacgtacgatacgtacggtacgtaccgtacgtattgcaattcttgctggaatgatttcactgcttgccgcatgcggcggtggaaacagttcgagtagcggcggcagcgcggccacgccaccgggcggcgtcaatctgcaagtcgtctcgttcggcgacagcctgtcggacgtcggcacttatgcgccgattgccagtgcggtcggcggcggacgtttcacgaccaatccggggcaagtgtgggatcaggacgtcgcgcaatattacggcggttcgctaagcgccgcgtttacgatcgacgtcggccatcagttgagcgcgcaaagcggtttcggctacgcagagggtggctcgacggtggccacgccggcgaacacgtacaattttctttccgacgtgatcggcaatgtcgaaatgccggtcaatcagcaggtttcgagctatctgaacgcgcacggaagcttcaattccaatcagttggtgctggtctgggccggcgcaaacgacgtgcttcgcgccggctcgctgccggccgcggcgccgaccgtgcagaccgcggcatccacgcttgcgcaactgattgggcagatcgttcagaacggcgccacgcatgtggtggtggtcaatgtgcccaacatcggcctgtcgcctaaaggcatcgcctcctccgacggcggagtcaatctgacccagttatcgcaacttttcaacgcggacctgaacacggccttgcaggccaacggcctgcaaggcaaggtcatccagatcgacgcttatacatgggtcggccagatcatcgcgaattatcaggccaacggcttcacggtgacgaacaccgcccaggcctgcgaccccaagaaaacgccggacgatacggcgttactgtgttcaccggcgacctacgtgacacccaatgccgaccagacctatatgttcgcggacgaccttcatccgaccacccatctgcatgcgctgttcgcccaatacgtagagcagcagatcgccaaaagcgggttaggtcactga

SEQ ID NO: 118 - protein, 348 aa, Unknown
  Obtained from an environmental sample.
MRAVCDEARTIRTVRTVRIAILAGMISLLAACGGGNSSSSGGSAATPPGGVNLQVVSFGDSLSDVGTYAPIASAVGGGRFTTNPGQVWDQDVAQYYGGSLSAAFTIDVGHQLSAQSGFGYAEGGSTVATPANTYNFLSDVIGNVEMPVNQQVSSYLNAHGSFNSNQLVLVWAGANDVLRAGSLPAAAPTVQTAASTLAQLIGQIVQNGATHVVVVNVPNIGLSPKGIASSDGGVNLTQLSQLFNADLNTALQANGLQGKVIQIDAYTWVGQIIANYQANGFTVTNTAQACDPKKTPDDTALLCSPATYVTPNADQTYMFADDLHPTTHLHALFAQYVEQQIAKSGLGH

SEQ ID NO: 119 - DNA, 1854 bp, Unknown
  Obtained from an environmental sample.
atgggtgtgtatgactacaagaatttcggtacggcggaatccaaggcgctgttcagcgacgccatggccattacgctgtattcctaccacaacctcgataacggcttcgccgtcggttatcagcacaacggcttcggcctcggcctgccggccacgctggtgaccgcgctgatcggtggcacggattcccagggggtaatccccggcattccgtggaaccccgattcggaaaaagccgcactcgacgcggtgcaaaaagccggatggaccccgatcaccgcctcgcagctgggttacgagggcaagaccgatgcccgcggcaccttcttcggcgaaaaggccggctacaccagcgcccaagtggaaatcctcggcaaatacgacgctcagggtcatctcaccgaaatcggcatcgcttttcgcggcaccagcggcccacgggaaatcctgatcggcgattccatcggtgacgtgatcaacgacttgctcgccgcattcgggcccaaggattacgccaagaactacgtcggcgaagccttcggcaacctgatgaacaatgtggtggcgttcgccaaggccaatggcctgaccggcaaagacgtgctggtcagcggtcacagcctcggcgggctggcggtcaacagcatggcggatttgagcacgagtaaatggggcgggttcttccaggactccaactacatcgcctacgcctcgccgacccagagcagcaccgacaaggtgctcaacgtcggctacgaaaacgatccggtgttccgcgccctcgacggctcgaccttcaccggcgcctcgctcggcgtgcacgacgcgccaaaggagtctgcgaccgacaacatcgtcagcttcaacgaccactacgcctcggcggcgtggaacgtgctgccgttttcgatcgtcaacattccgacctggatctcgcatctgccgaccgcttatggcgacggcatgaaccgggtgatcgagtcgaagttctacgacctgaccagcaaggactcgacgatcatcgtcgccaacctgtcggatccggcgcgggccaacacctgggtgcaggacctgaaccgcaacgccgaaacccacaagggcagcaccttcatcatcggcagcgacgccaatgacctgatccagggcggcagcggcaacgattatctggaaggccgcgccggcaacgacacgttccgcgacggcgggggctacaacatcctgctcggaggctcgggcaacaacaccctggagttgcagaagtcggtcaataccttcgacttcgccaacgacggcgccggcaacctgtacatccgcgatgccaacggcgggatcagcatcacccgtgacatcggcagcatcgtcaccaaggagccgggtttcctctggggtctgttcaaggacgacgtgacccacagcgtcacagcgaccggtctgaaggtcggcaacaacgtcacccagtacgaatcgagcgtgaagggcaccggcggcgccgacaccctcaaggccaaggctggcggtgactggctgttcggcctggacggcaacgaccatctgatcggcggggcgggcaacgacgtgttcgtcggcggcgccggcaatgacctgatggagtcgggcggcggggcggataccttcctgttcagcggcgcgttcggtcaggatcgcgtggtgggttacaccgctaacgacaaactggtgttcctcggcgtgcagggcgtgttgccaaacgacgacttccgcgcccatgccacggcggtggggcaggatacggtgctgaaattcggcgctgattcggtaacgctggtcggggttgcgttgaacagcctgagtgccgacgggattgtgatcgcctga

SEQ ID NO: 120 - protein, 617 aa, Unknown
  Obtained from an environmental sample.
MGVYDYKNFGTAESKALFSDAMAITLYSYHNLDNGFAVGYQHNGFGLGLPATLVTALIGGTDSQGVIPGIPWNPDSEKAALDAVQKAGWTPITASQLGYEGKTDARGTFFGEKAGYTSAQVEILGKYDAQGHLTEIGIAFRGTSGPREILIGDSIGDVINDLLAAFGPKDYAKNYVGEAFGNLMNNVVAFAKANGLTGKDVLVSGHSLGGLAVNSMADLSTSKWGGFFQDSNYIAYASPTQSSTDKVLNVGYENDPVFRALDGSTFTGASLGVHDAPKESATDNIVSFNDHYASAAWNVLPFSIVNIPTWISHLPTAYGDGMNRVIESKFYDLTSKDSTIIVANLSDPARANTWVQDLNRNAETHKGSTFIIGSDANDLIQGGSGNDYLEGRAGNDTFRDGGGYNILLGGSGNNTLELQKSVNTFDFANDGAGNLYIRDANGGISITRDIGSIVTKEPGFLWGLFKDDVTHSVTATGLKVGNNVTQYESSVKGTGGADTLKAKAGGDWLFGLDGNDHLIGGAGNDVFVGGAGNDLMESGGGADTFLFSGAFGQDRVVGYTANDKLVFLGVQGVLPNDDFRAHATAVGQDTVLKFGADSVTLVGVALNSLSADGIVIA

SEQ ID NO: 121 - DNA, 1413 bp, Unknown
  Obtained from an environmental sample.
atgggtgtgtttgattataaaaacgttggggccgagggctcaaaagcggtgttcgccgatgcgatggcgatcaccttgtatacctatcacaacctggataacggctttgccgtgggctatcagcacaacggactggggctgggtttaccggccacgttggtcggtgcgctgctcggcagcacggactcacagggcgtgatccccggtattccatggaaccccgactcggaaaaagctgcactggacgcggtgcagaaagccggttggacgcccatcagcgccggtaccctgggctatggcggcaaggtcgacgcgcgcggtacattctttggcgaaaaggccggctacaccacggcccaggtcgaagtgctgggcaggtacgatgacgccggcaagctgctggaaatcggtatcggctttcgcggcacgtccggcccgcgtgaaagcttgatcagcgattcgatcggcgatctggtcagtgacgtgcttgcggcgctggggcccagggattacgcgaaaaactacgccggtgaagcgttcggcggtttgctcaagagtgtcgccgagtatgccggcgcccagggcctgagcggcaaggatgtgctggtcagcggccacagcctgggcggcctggcggtgaacagcctggctgacttgagcgatgccaagtggggcgggttctacaaggacgccaattacgtggcctatgcctcgccaacccagagtgccggcgacaaggtgctcaatatcggctacgaaaacgacccggtgtttcgcgcgctggacggctcatccgtcaacctgtcgtccctgggcgtgcacgacacaccgcatgcgtcgaccaccgataacatcgtcagcttcaacgaccactacgcctcgacgctgtggaacgtgttgccgttttccatcgtcaacctgccgacctgggtctcgcatttgcccaccgcgtatggcgatggcatgacgcgcatcctggagtccgggttctatgagcagatgagccgcgattcgacgattatcgtcgccaacctgtccgacccggcgcgcgccaatacctgggtacaggatctgaaccgtaatgccgagccgcacaagggcgatactttcatcatcggcagtgacggcaatgacctgatccagggcggcaagggcgcggattttatcgagggcggcaagggcaatgacacgatccgcgataacagcgggcataacacttttctgttcagcggccagtttggccaggatcggctgattggctatcagcccacggacaagttggtgttccaggatgtgcagggaagtgtggattaccgtgagcaaggcggggatacggtgatcagctttggaggggactcggtgacgctggtgggagtgagtggctggtcgggggaggggattgtcattagctga

SEQ ID NO: 122 - protein, 470 aa, Unknown
  Obtained from an environmental sample.
MGVFDYKNVGAEGSKAVFADAMAITLYTYHNLDNGFAVGYQHNGLGLGLPATLVGALLGSTDSQGVIPGIPWNPDSEKAALDAVQKAGWTPISAGTLGYGGKVDARGTFFGEKAGYTTAQVEVLGRYDDAGKLLEIGIGFRGTSGPRESLISDSIGDLVSDVLAALGPRDYAKNYAGEAFGGLLKSVAEYAGAQGLSGKDVLVSGHSLGGLAVNSLADLSDAKWGGFYKDANYVAYASPTQSAGDKVLNIGYENDPVFRALDGSSVNLSSLGVHDTPHASTTDNIVSFNDHYASTLWNVLPFSIVNLPTWVSHLPTAYGDGMTRILESGFYEQMSRDSTIIVANLSDPARANTWVQDLNRNAEPHKGDTFIIGSDGNDLIQGGKGADFIEGGKGNDTIRDNSGHNTFLFSGQFGQDRLIGYQPTDKLVFQDVQGSVDYREQGGDTVISFGGDSVTLVGVSGWSGEGIVIS

SEQ ID NO: 123 - DNA, 1413 bp, Unknown
  Obtained from an environmental sample.
atgggtatctttgattataaaaacctcgggaccgagggctcaaaagcattgttcgccgatgccatggcgatcacgttgtattcctatcacaacctggataacggctttgccgtggggtaccagcacaacggcctggggctgggcttgccagctacgttggtcggggcgctgttgggcagcacggactcccagggcgtaatccccggcatcccctggaacccggactccgaaaaagccgcgctggacgcggtacacaaggccggttggacgcccatcagcgccagcaccctgggttacagtggcaacgtcgatgcgcgaggcaccttctttggcgagaagacgggctacaccacggcccaggtcgaagtgctgggcaagtacgatgacgccggaaaactgctggaaatcggcattggttttcgcggcacttcggggcctcgggaaaccttgatcagcgattccatcggtgacctggtcagcgacctgctggccgccctgggccccaaggattacgcgaagaattacgccggggaagccttcggcgggttgctcaagaatgtggccgactacgccagcgcccatggcttgagcggtcacgatgtggtggtcagcggccacagcctgggcgggctggcagtcaacagcatggccgacctgagcaacagcaagtggtcggggttctacaaggacgcgaactacgtggcctacgcctcgccgacccagagtgccagcgacaaggtgctcaacatcggctacgagaatgacccggtgttccgtgcgctggatggctcatccttcaccctgtcttccctgggtgtgcacgacaccccccatgagtccaccaccgacaatattgtcagtttcaacgaccactacgcctcgacgctgtggaatgtgctgccgttttccattgtcaatctgccgacttgggtttcgcacctgcctaccgggtacggcgatggcctgagtcgcgtgctcgactccgggttctatgagcaaatgacccgcgactccgccgtgatcgtcgccaacctgtccgacccggcacgggccaccacctgggtgcaggacctcaaccgcaatgccgagccgcataagggcaataccttcatcatcggcagcgacggccacgacctgatccagggcggcaagggtgcggactttatcgaaggcggcaaaggcaatgacacgattcgtgacaacagcgggcacaacacctttttgttcagcggtcagtttggccaggaccggatcatcggctatcagccaagcgatcaactggtattcaaggaggtagaggggagtgctcaataccgtgagcacggaggggacacagtgatcagcttcggcgcagattcggtgacattggtgggggtcaacgggtggtcgggggagggcgttgccatcggttga

SEQ ID NO: 124 - protein, 470 aa, Unknown
  Obtained from an environmental sample.
MGIFDYKNLGTEGSKALFADAMAITLYSYHNLDNGFAVGYQHNGLGLGLPATLVGALLGSTDSQGVIPGIPWNPDSEKAALDAVHKAGWTPISASTLGYSGNVDARGTFFGEKTGYTTAQVEVLGKYDDAGKLLEIGIGFRGTSGPRETLISDSIGDLVSDLLAALGPKDYAKNYAGEAFGGLLKNVADYASAHGLSGHDVVVSGHSLGGLAVNSMADLSNSKWSGFYKDANYVAYASPTQSASDKVLNIGYENDPVFRALDGSSFTLSSLGVHDTPHESTTDNIVSFNDHYASTLWNVLPFSIVNLPTWVSHLPTGYGDGLSRVLDSGFYEQMTRDSAVIVANLSDPARATTWVQDLNRNAEPHKGNTFIIGSDGHDLIQGGKGADFIEGGKGNDTIRDNSGHNTFLFSGQFGQDRIIGYQPSDQLVFKEVEGSAQYREHGGDTVISFGADSVTLVGVNGWSGEGVAIG

SEQ ID NO: 125 - DNA, 1350 bp, Unknown
  Obtained from an environmental sample.
atggcaacaatgatgcgcggagcaagcaagctcctggctggcatggccctggcggtatcggctttgactgcaaccggcgaagcgttcgccgcgaacaatctgccgattgtattggtacacggctttatcggcttcggcccgaacgagctgcaaggcaccggtttcaaatactggggcggtttcaacgatgtcgaggcttacctcagaaccaataacggcagccatcaggttcataccgccgcagtgggcccggtcagctcgaactgggatcgtgcggtcgagctgttctatcagatcaagggcggctgtgccgattacggcgctgcacgcaccgccagatttgctgcctacggcaaaatccagaagccggccggcaaatgctgggcgaccgacccgaacaacaacccgaacaactacccgttggcactgtacccgcaatgggatgccgcccacccgatccatctggtgtcgcacagccagggcggtcagaccatccgcacgatgatccagctgctggaaaacggctcgccttacggcaatgaaggcaacggcgcactgtataccggcggcaagatcggctgggtgaaaagcgccaccaccatttccaccccgcataacggcaccacgctgcgcgacgtgatcatcgactacgtaccgaaaatttccgaactggccggcaaagtcgtcgaagtggccggactcggcggcagcggcggccggatctacaacttcaagctggagcaatacggcctggcacaaggcccgtcggaaaacttccaggatttcatcaaccgcaccaagggcgcaccgtactggaaactggacaacaaagactcggcacagtgggatctgggcccggatggcgcgaaagagctgaacagctgggtcaagacctcgccgaacgtgtattactactcgatcgccaaccatgcaaccgaacagggcagcttctgctgcaacgaaaccgaccgcctgatcgccccgatccagagcagcaattaccagtatgcccgcaacgacatgatcttcttcctgaagaacaccgccggcgaatgggtggtcccgtccatcctcaaccgcggcatgggttcatacacccagaccgatccgagccgggtactgatcgacagcaactggttcctcaacgacggcgtggtcaactacatcagcatgaagtcgccgtcgggccagccggtacgcaactacaacggcacctcggtcaagggttactggaatcacctcggctactacaacaactacgatcacttcgacgtcatcggctggctgaactccagctcgaccgtttacccgatctacaactacctgaccggtatcctgtacggtctgtga

SEQ ID NO: 126 - protein, 449 aa, Unknown
  Obtained from an environmental sample.
MATMMRGASKLLAGMALAVSALTATGEAFAANNLPIVLVHGFIGFGPNELQGTGFKYWGGFNDVEAYLRTNNGSHQVHTAAVGPVSSNWDRAVELFYQIKGGCADYGAARTARFAAYGKIQKPAGKCWATDPNNNPNNYPLALYPQWDAAHPIHLVSHSQGGQTIRTMIQLLENGSPYGNEGNGALYTGGKIGWVKSATTISTPHNGTTLRDVIIDYVPKISELAGKVVEVAGLGGSGGRIYNFKLEQYGLAQGPSENFQDFINRTKGAPYWKLDNKDSAQWDLGPDGAKELNSWVKTSPNVYYYSIANHATEQGSFCCNETDRLIAPIQSSNYQYARNDMIFFLKNTAGEWVVPSILNRGMGSYTQTDPSRVLIDSNWFLNDGVVNYISMKSPSGQPVRNYNGTSVKGYWNHLGYYNNYDHFDVIGWLNSSSTVYPIYNYLTGILYGL

SEQ ID NO: 127 - DNA, 855 bp, Unknown
  Obtained from an environmental sample.
gtggctctcgtcgtcgatgacgaggattttgccttcaggttcgatcacggccatcatgggatccgacgggccgggcggccggtccccctcaggctcagggccgcatccctgattctcaccctggtcctgacggcagctctgctggcaggtatcacaacggctcccccagcagaggcaacgaccggacgaaatcccgttctcctggtgcacgggctaacggccgactcgctctcctggctggtcttcaaggcgagactggagagggacggcttccgggtcttcacggtcgacataccggacaggggattcggcgacatagccaggaactcccagtacgtggccgccaaggtcgacgaaataaggagggtgaccggagccgccaaggtcgacgtgatcggacactccgaagggggactgctcgcccgccactacatcaagtacaggggtggggcggaccaggtcggcagatatatcagcctcgggaccccacagtacgggaccgtcctcgccaacttctccacggtcttcaacttggcgagtctggtgggttgtgtcgcctgctaccagatgaccacagggtcgtccttcctggccaacctcaactcgggagacgacaccccgggtccggtgaagtacacgacgatctacacggtctatgacgagctggtccagccctactggaacgccgccttggggaaccagccggtgaccaacgtcaagatccagagcatctgcccgaaccgcgtggtggggcacatcggactggtcctggacggcacgacataccagatcgcccgagcggcgctcagggatcagacgccctcctggagcaacgtcaactgctgggcgctctga

SEQ ID NO: 128 - protein, 284 aa, Unknown
  Obtained from an environmental sample.
VALVVDDEDFAFRFDHGHHGIRRAGRPVPLRLRAASLILTLVLTAALLAGITTAPPAEATTGRNPVLLVHGLTADSLSWLVFKARLERDGFRVFTVDIPDRGFGDIARNSQYVAAKVDEIRRVTGAAKVDVIGHSEGGLLARHYIKYRGGADQVGRYISLGTPQYGTVLANFSTVFNLASLVGCVACYQMTTGSSFLANLNSGDDTPGPVKYTTIYTVYDELVQPYWNAALGNQPVTNVKIQSICPNRVVGHIGLVLDGTTYQIARAALRDQTPSWSNVNCWAL

SEQ ID NO: 129 - DNA, 1305 bp, Unknown
  Obtained from an environmental sample.
atgagaactcgcattaatcgcttcggtcttggcgcagcgctgatttgcgccggtttaggtatggcttccattgcccaggcagccaataattatccggtgatttttgtgcatggctttgccggctttggtcctaccgaaatgctgggatataaatactggggcggcttgaccgatctccagtcgcaactgcaagccaaatacaccaatcaactcgtaagaacagccacggtcggcccattcagttccaactgggatcgcgcggtggaactgttctatcagatcaagggcggctgcgtagattatggcgagatgcacgcacagacttatggccatctgcgccagccggaagcttattatcacaacgggcgcacctgttatccgggcctctatcccgcctgggacgccagccatccggtgcatctggtttcgcacagcatgggcggccaaacctcgcggatgctggtgcaactgctgaaggataacggcacaccgaccaatcccggtttattcccttcctcctacaccaccagttcagactggataaagagcgtcaccacgatctccacccccaacgatggcaccacgctggcctaccgggtcaccgactgggtccccttcgtgcagcagctcgtcaccggcattgccggcatagcgggagtgaccggcaatccggccaccaaaatttatgatttcaagatggatcagtggaagatcggcccgcaaacgagtagtgaaggcttcactaactatgtgagccgggtgatgaactcacctctgtggtccaatagccagttaaaagatatttccacctacgacttgagtccagccggggcgatggaagaaaaccactgggtcaaggatcagccgaatgtttactacttctcggtaagcaccaaatcctccaccaccggtctcattacgggctgggaatatccgatagcgtccgctaatcccctgctcgggatattggccgggccgggctggatgggtaatttcacgcctgatagtcgcccattcccgtattcagcgagcaatccggtgtataatatctggtgggcgactgacacggtggtgccgacgatttcaatgaaagcgcccacttgggcaatgaatgagcacggtgagatttatccacgccaggttatcataaaggacctcagtaatggtggcgctccgcaggttggcgcctggaactggaaagggctgatggatacctgggatcacatggacatcattggctggacgctgttctgggacagcgtgggctggtataagaaacacgttgatcaactgcgttcgctttga

SEQ ID NO: 130 - protein, 434 aa, Unknown
  Obtained from an environmental sample.
MRTRINRFGLGAALICAGLGMASIAQAANNYPVIFVHGFAGFGPTEMLGYKYWGGLTDLQSQLQAKYTNQLVRTATVGPFSSNWDRAVELFYQIKGGCVDYGEMHAQTYGHLRQPEAYYHNGRTCYPGLYPAWDASHPVHLVSHSMGGQTSRMLVQLLKDNGTPTNPGLFPSSYTTSSDWIKSVTTISTPNDGTTLAYRVTDWVPFVQQLVTGIAGIAGVTGNPATKIYDFKMDQWKIGPQTSSEGFTNYVSRVMNSPLWSNSQLKDISTYDLSPAGAMEENHWVKDQPNVYYFSVSTKSSTTGLITGWEYPIASANPLLGILAGPGWMGNFTPDSRPFPYSASNPVYNIWWATDTVVPTISMKAPTWAMNEHGEIYPRQVIIKDLSNGGAPQVGAWNWKGLMDTWDHMDIIGWTLFWDSVGWYKKHVDQLRSL

SEQ ID NO: 131 - DNA, 1854 bp, Unknown
  Obtained from an environmental sample.
atgggtgtgtatgactacaagaacttcagcacagcggattccaaggcgttattcagcgatgccatggccattacgctgtactcctatcacaacctcgacaacggttttgcggtcggctatcagcacaacggcttcggcctcgggctgccggccacgctgatcagcgcgctgatcggcggcaccgattctcaaggggtgattcccggacttccctggaaccccgactcggaaaaactcgccctcgatgccgtgaaaaaggctggctggacgcccatcactgcgtcgcaactgggctatgacggcaagactgatgttcgcggaaccttcttcggcgaaaagcccggttacaccagtgcgcaagtggaaatcctcggcaagtacgacgctcagggtcatctcacggaaataggcatcgcctttcgcggcaccagcggcccacgggaaatcctgattggtgactccatcgccgacgccatcaatgacctgctcgctgcattcggccccaaggattacgccaagaactacgtcggcgaagccttcggcaacctgatgaacaacgtggtggcgttcgccaaggccaacggcctcagcggcaaggacgtactggtcagtggccacagcctcggtgggctggcggtcaacagcatggcggacctgagtggcagcaaatggggcgggttcttccagaactccaactacatcgcctacgcctcgccgacccagagcagcaccgacaaagtgctcaacgtcggctacgagaacgatccggtattccgcgccctcgacggctcgaccttcaccggtgcatcgcttggcgttcacgacgcgtcgaaagtctcggccaccgacaatatcgtcagcttcaacgaccactacgcctcgaacgcgtggaacgtgctgccgtattcgatcgtcaacatcccgacctggatctcgcacctgccgacggcttacggcgacggcatgaaccgggtcatcgagtcgaagttctacgacctcaccagccgtgattcgacgattatcgtggccaacctgtcggacccggcgcgggccaacacctgggtgcaggacctcaaccgcaacgccgagccccacaagggcagcaccttcatcatcggcagcgacggtaacgatctgatccagggcggcagcggcaacgattatctggaaggccgtgccggcaatgacaccttccgtgacagcggcggctacaacatcattctcggcggttcaggcaacaacacccttgagctgcagcagtcggtgaacaagttcgacttcgccaacgacggcgccggcaacctgtacatccgcgatgccaacggcgggatcagcatcacccgcgacatcggcagcatcgttaccaaggagccgggcttcctctggggcctgttcaaggacgacgtgacccacagcgtgaccgccgatggcctgaaggtcggcaacaacgtcacccagtacgagtcgagcgtgaagggcaccagtggcgccgacaccctcaaggcccacgccagcggtgactggctattcggcctggacggcaacgatcacctgatcggcggcgcgggtaacgacgtgttcgtcggcggcgccggcaatgacctgatggagtcgggcggcggggcggatacgtttctgttcagcggcgcattcggccaggaccgggtggtgggcttcaacggcaacgacaaactggtgttcctcggggtgcagggcgtgttgcccggcgatgacttccgcgcccatgccacgtcggtggggcaggatacggtgctgaagtttggcgctgattcggtgacgctggtcggggtttcgctgagcagtctcagcgccgatgggatcgtgatcgcctga

SEQ ID NO: 132 - protein, 617 aa, Unknown
  Obtained from an environmental sample.
MGVYDYKNFSTADSKALFSDAMAITLYSYHNLDNGFAVGYQHNGFGLGLPATLISALIGGTDSQGVIPGLPWNPDSEKLALDAVKKAGWTPITASQLGYDGKTDVRGTFFGEKPGYTSAQVEILGKYDAQGHLTEIGIAFRGTSGPREILIGDSIADAINDLLAAFGPKDYAKNYVGEAFGNLMNNVVAFAKANGLSGKDVLVSGHSLGGLAVNSMADLSGSKWGGFFQNSNYIAYASPTQSSTDKVLNVGYENDPVFRALDGSTFTGASLGVHDASKVSATDNIVSFNDHYASNAWNVLPYSIVNIPTWISHLPTAYGDGMNRVIESKFYDLTSRDSTIIVANLSDPARANTWVQDLNRNAEPHKGSTFIIGSDGNDLIQGGSGNDYLEGRAGNDTFRDSGGYNIILGGSGNNTLELQQSVNKFDFANDGAGNLYIRDANGGISITRDIGSIVTKEPGFLWGLFKDDVTHSVTADGLKVGNNVTQYESSVKGTSGADTLKAHASGDWLFGLDGNDHLIGGAGNDVFVGGAGNDLMESGGGADTFLFSGAFGQDRVVGFNGNDKLVFLGVQGVLPGDDFRAHATSVGQDTVLKFGADSVTLVGVSLSSLSADGIVIA

SEQ ID NO: 133 - DNA, 1689 bp, Unknown
  Obtained from an environmental sample.
atgggattgttcgattacaaaaatgccgacggcaaagcgctgtacagcgacgccatcgccctgacgctgtatgcctacacgccgaccgggcaggccttgcccggcactggctggaagccgatcggcgccacggcgctgggctatcagggcaaggtcggggcgcagggcacgttcttcggcgagaaggacggctttaccagcgccgaagccgaagtgctcggcaagtacgacgccgcgggcaagctgatcggcatcggcgtggccttccggggcaccggcgggctgggttacagcgacaccttcggcgacatgaaaaacaatctgctggccgccatcggcccgacggattacgccacccagtacgcgaaaaatgctttcgacaacctgctcaaatcggtggcggctttcgccatcgcccacggcatcgcggccaaggacgtaatgatcagcggccacagcctcggcggcctcggggtcaacagcgtggcggagttgagcgcgagcaactggggcgggttcttcaaggacgccaactacatttcgttcgcctcgccgacccagagcagcaccggcaccaacgtgctgaacatcggctacgagaacgacccggtgttccgcgtgctcgacggcaccacgttcagtaccgcgtcgatgggcaagcacgacaagccgcacgactcgaccaccgacaacatcgtcaacttcaacgacaactacgcgtccaccgcgcagaacctggtgccattcagcatcgccaatccgctgaactggtcggcccacagctcgctggggtatgccgacggactgaaccgggtgatcgcgtcgaagttctacggcctgacgcacaaggattcgacgatcatcgtctccaaccttgaagaagcgtcgcggggcaagacctgggtcgaggatctgggccgcagcggcgagccgcacaccggcagcacgttcatcatcggcaccgacagcggtgactggctcaagggcggggcgggcaacgacttcctcgaagggctgggcggcgatgaccgtttccgtgacgacggcggcttcaacatcctgctcggtggccagggccacaacaccttcgagctgcaaaagccgttgcagaacttcagcttcgccaacgatggcgacggcacgctgtacgtgcgtgacgcctacggcggcatcagcatgacccgtgacatcggcgcgctggtgagcaaggagtcggggtcgtggtggggcagcaaggaaatcacctggaccgtcaccgccaaaggcctggccaacggtgccgaactgacgcagtacaaccattcgctcagcggcggcgccatgggcgacaccctcaaagccaccgctgacggcgactggctgttcggcctgggcggcaacgatcacctgcaaagcgacaaggcccacgtgaccttcgtcggcggtgccggcaacgacgtgatgagcgcggtgggtggcaataacaccttcctgttcagcggcgccttcggcttcgacgcgatcaatggctaccagggcagcgacaaactggtgttcacgggcgtcgaaggcgcggggcagggctacgactacaagcaacacgcgtcgcagtccggaagcgataccgtgctgaagattggcgactttgccgtgacgctggtcggggtaggtgtggctaacctgtcggattcgagtttcgtcttcgcctga

SEQ ID NO: 134 - protein, 562 aa, Unknown
  Obtained from an environmental sample.
MGLFDYKNADGKALYSDAIALTLYAYTPTGQALPGTGWKPIGATALGYQGKVGAQGTFFGEKDGFTSAEAEVLGKYDAAGKLIGIGVAFRGTGGLGYSDTFGDMKNNLLAAIGPTDYATQYAKNAFDNLLKSVAAFAIAHGIAAKDVMISGHSLGGLGVNSVAELSASNWGGFFKDANYISFASPTQSSTGTNVLNIGYENDPVFRVLDGTTFSTASMGKHDKPHDSTTDNIVNFNDNYASTAQNLVPFSIANPLNWSAHSSLGYADGLNRVIASKFYGLTHKDSTIIVSNLEEASRGKTWVEDLGRSGEPHTGSTFIIGTDSGDWLKGGAGNDFLEGLGGDDRFRDDGGFNILLGGQGHNTFELQKPLQNFSFANDGDGTLYVRDAYGGISMTRDIGALVSKESGSWWGSKEITWTVTAKGLANGAELTQYNHSLSGGAMGDTLKATADGDWLFGLGGNDHLQSDKAHVTFVGGAGNDVMSAVGGNNTFLFSGAFGFDAINGYQGSDKLVFTGVEGAGQGYDYKQHASQSGSDTVLKIGDFAVTLVGVGVANLSDSSFVFA

SEQ ID NO: 135 - DNA, 942 bp, Unknown
  Obtained from an environmental sample.
atgaccggatttttcagccgcctattgcggcgacttgcgctggcggccactgcagggcttttgctgctgggggccagcgtccatgcgcaaaacggctacacacaaacgcgctaccccatcgtgctggtgcatgggctttttggttttgactcggcgctgggcattgactacttctacggcatccccgatgccttgcgccagggcggcgccaaggtctacgtggcgcaggtgtcggcggccaacagcaccgaggtgcgcggcgagcagttgctggcacaggtcaaaaccatcctggcgatgaccggtgccgccaaggtcaacctggtcggccattcgcacggcgggcccaccacgcggtatgtggcgggcgtggcgccgcaactggtggcgtcggtcacgtcgattggcggggtgaacaagggctcgcgcgtggcagacatcctgcggggcgtggcgccttccggatcggtgtctgaaaccgtggccaatgcagcggccaaggcgctggtgggcctgattaatctgacgtcgggcggtaccggcctgccccagatgcccacggcggcgctggactcgctcaccacggcgggctctgccaagttcaacagccgctttccgcaaggcgttcctacctcgggctgcggcaatggggcagagctggtcaacggcgtgcgttattactcgtggaccggcacgcagccgctgaccaatgtgctcgacgccagcgacggcctgctcagtgtgatgagtctgacctttggcgaagccaatgacggcctggtgtcggcctgttcgtcgcgcctgggcaaacacctgggcgactaccgccagaaccacctggacgaggtcaaccagctgctgggcctgcgcgactggttctctaccgacccggtaacgctgtaccgccagcacgccaaccgcctgaagacgctgggcctgtaa

SEQ ID NO: 136 - protein, 313 aa, Unknown
  Obtained from an environmental sample.
MTGFFSRLLRRLALAATAGLLLLGASVHAQNGYTQTRYPIVLVHGLFGFDSALGIDYFYGIPDALRQGGAKVYVAQVSAANSTEVRGEQLLAQVKTILAMTGAAKVNLVGHSHGGPTTRYVAGVAPQLVASVTSIGGVNKGSRVADILRGVAPSGSVSETVANAAAKALVGLINLTSGGTGLPQMPTAALDSLTTAGSAKFNSRFPQGVPTSGCGNGAELVNGVRYYSWTGTQPLTNVLDASDGLLSVMSLTFGEANDGLVSACSSRLGKHLGDYRQNHLDEVNQLLGLRDWFSTDPVTLYRQHANRLKTLGL

SEQ ID NO: 137 - DNA, 1854 bp, Unknown
  Obtained from an environmental sample.
atgggtgtgtatgactacaagaacttcagcacagcggattccaaggccttgttcagcgacgccatggccatcacgctgtactcctatcacaacctcgacaacggtttcgcggtcggctatcagcacaacggtttcggcctcggcctgccggccacgctgatcagcgcactgatcggcggtaccgattctcaaggggtgattcccggactcccgtggaatcccgattcggaaaaactcgccctcgacgccgtgaagaaagccggctggacaccgatcaccgcctcgcaactgggctatgacggcaagactgacgtgcgcggaaccttcttcggcgaaaagcccggctacaccagcgcccaggtggaaatcctcggcaagtacgacgcccagggccatctcacggaaatcggcatcgcctttcgcggcaccagtggcccacgggaaatcctgattggtgactccatcgccgacgccatcaatgacctgctcgctgcattcggccccaaggattacgccaagaactacgtcggtgaagccttcggcaacctgatgaacaacgtggtggcgttcgccaaggccaacggcctcaccggcaaggacgtactggtcagcggccacagcctcggcgggctggcggtcaacagcatggcggacctgagcggcagcaagtggggcgggttcttccaggactccaactacatcgcctatgcctcgccgacccagagcagcaccgacaaggtactcaacgtcggctacgagaacgacccggtgttccgcgccctcgacggctcgaccttcaccggcgcctcgcttggcgtacacgacgcgtcgaaagtgtcggccaccgacaatatcgtcagcttcaacgaccactacgcctcgaacgcgtggaatgtgctgccatattcgatcgtcaacatcccgacctggatctcgcatctgccgacggcttacggcgacggcatgaaccgggtcatcgagtcgaagttctacgatctcaccagccgtgactcgacgatcatcgtggccaacctgtcggacccggcgcgggccaacacctgggtgcaggatctcaaccgcaacgccgagccccacaagggcagcaccttcatcatcggcagcgacggcaacgacctgatccagggcggcagcggtaacgattatctggaaggccgtgccggcaacgacaccttccgcgacagcggcggctacaacatcatcctcggcggttcaggcaacaacaccctcgagttgcagcagtcggtgaacaagttcgacttcgccaacgacggcgccggcaacctgtacatccgcgatgccaacggcgggatcagcatcacccgcgacatcggcagcatcgttaccaaggaaccgggcttcctctggggcctgttcaaggacgacgtgacccacagcgtgaccgccgatggcctgaaggtcggcaacaacgtcactcagtatgagtcgagcgtgaagggcaccagtggcgccgacaccctcaaggcccatgccggtggcgactggctgttcggcctggacggcaacgatcacctgatcggtggcgcgggcaatgacgtgttcgtcggcggcgccggcaatgacctgatggagtccggtggcggggcggataccttcctgttcagcggcgcgttcggccaggaccgggtggtgggcttcaacggcaatgacaaactggtgttcctcggcgtgcagggcgtgttgcccggcgatgacttccgcgcccatgccacgtcggtggggcagtatacggtactgaagttcggtgccgattcggtgacgctggtcggggtatcgctgaacagtctcagcgccgatggcatcgtgatcgcctga

SEQ ID NO: 138 - protein, 617 aa, Unknown
  Obtained from an environmental sample.
MGVYDYKNFSTADSKALFSDAMAITLYSYHNLDNGFAVGYQHNGFGLGLPATLISALIGGTDSQGVIPGLPWNPDSEKLALDAVKKAGWTPITASQLGYDGKTDVRGTFFGEKPGYTSAQVEILGKYDAQGHLTEIGIAFRGTSGPREILIGDSIADAINDLLAAFGPKDYAKNYVGEAFGNLMNNVVAFAKANGLTGKDVLVSGHSLGGLAVNSMADLSGSKWGGFFQDSNYIAYASPTQSSTDKVLNVGYENDPVFRALDGSTFTGASLGVHDASKVSATDNIVSFNDHYASNAWNVLPYSIVNIPTWISHLPTAYGDGMNRVIESKFYDLTSRDSTIIVANLSDPARANTWVQDLNRNAEPHKGSTFIIGSDGNDLIQGGSGNDYLEGRAGNDTFRDSGGYNIILGGSGNNTLELQQSVNKFDFANDGAGNLYIRDANGGISITRDIGSIVTKEPGFLWGLFKDDVTHSVTADGLKVGNNVTQYESSVKGTSGADTLKAHAGGDWLFGLDGNDHLIGGAGNDVFVGGAGNDLMESGGGADTFLFSGAFGQDRVVGFNGNDKLVFLGVQGVLPGDDFRAHATSVGQYTVLKFGADSVTLVGVSLNSLSADGIVIA

SEQ ID NO: 139 - DNA, 1689 bp, Unknown
  Obtained from an environmental sample.
atgggattgttcgattacaaaaatgccgacggcaaagcgctgtacagcgatgccatcgcgctgacgctgtattcctacacgccgaccgggcagcctttgcccggcaccggttggtcgccactgggcgcctcggccctgggttatcaaggcaagaccgacgcgaaagggacgttcttcggcgagaaggacggcttcaccagcgccgaggcggaagtgctcggcaaatacgacgccgccggcaagctgatcggcatcggcgtggcctttcgcggcactggcgggctgagttacagcgacaccttcggcgacatgaaaaacaacctgctggccgccatcggtccggtggattacgccaagaattacgcgaagaacgccttcgacaacctgctcaaatccgtcgccgcgtttgccacggctcacggcattgccgccaaggacgtgctgatcagcggccatagcctcggcgggctcggggtcaacagcgtggcggaactgagcgtgagcgactggggtggtttcttcaaggacgccaactacatttcgttcgcctcgccgacccagagcagcaccggcaccaacgtgctgaacatcggctacgagaacgatccggtgttccgtgtgctcgacggcaccacgttcagcacggcgtcgatgggcaaacacgacaagccgcacgactcgaccaccgacaacatcgtcaacttcaacgacaactacgcgtccaccgcgcagaacctggtgccgttcagcatcgtcaacccgctgaactggtcggcccacagctcgctggggtatgccgatggcctgaaccgggtgatcgactcgaagttctacaacctcaccagccaggattcgaccattatcgtgtccaatctggaagcctcgtcccggggcaagacctgggtcgaagatctgggccgcagcggcgagccgcacaccggcagcactttcatcatcggcaccgacagcaacgactggctcaagggcggggcgggcaacgacttcctcgaaggccgtgccggcgatgacctgttccgtgatgacgggggcttcaacattctgttgggcggccagggccacaacaccttcgacctgcagaaaccgttgcagaacttcagcttcgccaacgacggcgacggcacgctgtacgtgcgcgacgcctacggcggcatcagcatgacccgtgacatcggcgcaatcgtgagcaaagagtccggttcgatgtggagcagcaaggaaatcacctggaccgtcaccggcaaaggcctggccaacggcgccgaactgacccagtacaaccattcgctcaacggcggcgcactcggcgacacgctgaaagccaccgcggacggcgactggctgttcggcctgggcggcgacgatcacctgttcagcgacaaggcccacgtgaccttcgtcggcggcgccggcaatgacgtgatgaatgcggtgggtggcaacaataccttcctgttcagcggcgcgttcggcttcgactcgatccatggctaccagggcagcgacaaactggtgttcatgggcgtgcagggcgcggggcagggctacgactacaagcaacatgcttcgcagtccggcgccgataccgtgctgaagattggcgactatgccgtgaccctgatcggggtgggtgtggctaacctgtcggactcgagtttcgtgttcgcctga

SEQ ID NO: 140 - protein, 562 aa, Unknown
  Obtained from an environmental sample.
MGLFDYKNADGKALYSDAIALTLYSYTPTGQPLPGTGWSPLGASALGYQGKTDAKGTFFGEKDGFTSAEAEVLGKYDAAGKLIGIGVAFRGTGGLSYSDTFGDMKNNLLAAIGPVDYAKNYAKNAFDNLLKSVAAFATAHGIAAKDVLISGHSLGGLGVNSVAELSVSDWGGFFKDANYISFASPTQSSTGTNVLNIGYENDPVFRVLDGTTFSTASMGKHDKPHDSTTDNIVNFNDNYASTAQNLVPFSIVNPLNWSAHSSLGYADGLNRVIDSKFYNLTSQDSTIIVSNLEASSRGKTWVEDLGRSGEPHTGSTFIIGTDSNDWLKGGAGNDFLEGRAGDDLFRDDGGFNILLGGQGHNTFDLQKPLQNFSFANDGDGTLYVRDAYGGISMTRDIGAIVSKESGSMWSSKEITWTVTGKGLANGAELTQYNHSLNGGALGDTLKATADGDWLFGLGGDDHLFSDKAHVTFVGGAGNDVMNAVGGNNTFLFSGAFGFDSIHGYQGSDKLVFMGVQGAGQGYDYKQHASQSGADTVLKIGDYAVTLIGVGVANLSDSSFVFA

SEQ ID NO: 141 - DNA, 927 bp, Unknown
  Obtained from environmental sample
gtgagcattcgtctgcgactgttaaactggtttttgaatacctttgaaaaaccaaaactggccgcggccaaaacgccggatgatttgcgaaaatcgtttgaattaaaggcgaggtttttgtttccggcgccacgtaaaacaaggtttagtcatgatgtattgcagtcaggcatcgggtcggtaaatgcccagtgggcgaaatccaaatctgcatctgatgacagggtaatcctgtattttcatgggggagggtatgtttttgggtcaccaaaaacgcaccgtgcaatgttggcgcgcttgtcggcaatgacaggtctttctgcgtgccttccagattataggttggcaccagagcacccatttccagccgcgatcgaagatgcagttttatcgtataaatgtttactagagcgagcaatcgagccccaaaatattatactggggggggacagtgctggtggcggtttggttcttgctttgcttgcagaaatcaaggcccaatccttgcccaaacctgctggcgtttttgccttgtcgcctttggttgatttatcattttcgggcctttcgttttctaaaaatgcccaaaccgatgtgatgttgcccgcatcacgggctgcggatatggcgaccttgtatttggatggggccgatgcagatgatccacgtgcatcgccgctgcaggcggatttttctggcatgccgcctgtatttctgacagcaagtgacagtgaaatcctgttggatgattgcctgcggatggcggatcacttgcgtgcgcaaggtgtcgttgtgacagaccggattgttgaaaaccatccacatgtttggcatatttttcaacgccttctacccgaagcagatcaggggctgcgggcgattgccgcgtggattaaacctcttttatcaggttcaaacgaaagctaa

SEQ ID NO: 142 - protein, 308 aa, Unknown
  Obtained from environmental sample
MSIRLRLLNWFLNTFEKPKLAAAKTPDDLRKSFELKARFLFPAPRKTRFSHDVLQSGIGSVNAQWAKSKSASDDRVILYFHGGGYVFGSPKTHRAMLARLSAMTGLSACLPDYRLAPEHPFPAAIEDAVLSYKCLLERAIEPQNIILGGDSAGGGLVLALLAEIKAQSLPKPAGVFALSPLVDLSFSGLSFSKNAQTDVMLPASRAADMATLYLDGADADDPRASPLQADFSGMPPVFLTASDSEILLDDCLRMADHLRAQGVVVTDRIVENHPHVWHIFQRLLPEADQGLRAIAAWIKPLLSGSNES

SEQ ID NO: 143 - DNA, 843 bp, Unknown
  Obtained from environmental sample
gtgactcggggggagcacgtgcgcctgccagcggggctccccatcgacgtcgagcgggtgggaaccggccccccgctcgtcttcctgcacggcttcggagccagccggttcagttggaggcactgggtggaggcgctcagtggagactacacgctgtacctggtcgacctgcgcggattcggggccgcgccccccgcgccggacgggcgctacggccctccggagatggcccgggacgtcgccggcctcgtccgctcgctcgacctggagcgggtgacgctggtggggcactcgatggggggcggggtggcgctgctggcctcgctgctgctacgggacgcgggcgagggggcacgcctcacgcgactcgtgagcgtggccggaaccgcctacgaccagcgtctaccgcccgtcatcggcctgctccgtctacggaccgggcgcgcgatcctccggcacctacccgcccacctcgtggtggcgcccgtcctccgacgcatcgtgtacgacccggcgtccgtcaccgcggagcaggtggaaggctactcgcgaccgctccgctcacgccccgcgcgcgaagcgctgatcgcctgcgtgcgccatctggttccggagaacctcgaccggatcgtcgcgcgctacccgggcctcgacctccccgcgctcctcatctggggacgccaggaccccgtcgtgcccctggcgttgggagagcgcctcgcgcgcgagctcccgcacgcgaggctggccgtgctcgagcgttgcggccacctgccggccgaggaacacccccaggcctcgctcgggctcctcagggccttcctggacgggtcaagctcttga

SEQ ID NO: 144 - protein, 280 aa, Unknown
  Obtained from environmental sample
  DOMAIN (50)...(273): alpha/beta hydrolase fold
MTRGEHVRLPAGLPIDVERVGTGPPLVFLHGFGASRFSWRHWVEALSGDYTLYLVDLRGFGAAPPAPDGRYGPPEMARDVAGLVRSLDLERVTLVGHSMGGGVALLASLLLRDAGEGARLTRLVSVAGTAYDQRLPPVIGLLRLRTGRAILRHLPAHLVVAPVLRRIVYDPASVTAEQVEGYSRPLRSRPAREALIACVRHLVPENLDRIVARYPGLDLPALLIWGRQDPVVPLALGERLARELPHARLAVLERCGHLPAEEHPQASLGLLRAFLDGSSS

SEQ ID NO: 145 - DNA, 765 bp, Unknown
  Obtained from environmental sample
atgcccgaacttaaaccgttgtggcccaacaaccagcgaccgaccgtttctttgcaggaatggcgcgcacccaaacccaatggaactggagttttggtgtgtcccggcggcggttacggcgcgctggcgaccggtcacgaaggcgacgacatcgcgcgttatctcaacgagcgcggcttcgatgcgtgggttttgcgctacaccatcgccagtgcgcaaaccccggggccgctgctggaaaagccgctggctgatgcgcagcgcgcgttgcgacaaattcattatggcccgaacgcgccacaaaagttgggcatctggggtttttccgccggtggacatctggcggcgacggtttccacgcagtggcaaaaaccgatcgaagacgcgccgcctttgcgccccgatttttcaattttggcgtatcccgtcatcacgatggacgcgtggacgcacggtggttcgcgccataatttgttggggccaacgccgacgccggagcaaatcgagcgcttttccaacgaaagacaggtgaacgcgcaaacaccgcccacgtttttgtttcacaccgccgatgatggcgcggtgcccgtcgaaaacgcgctacgctacgcgctggcgctggaaaaacacaaagtcccgtgcgaattgcattcgtatcgcagcgggccgcacggtgtggggctggccgcaaaccatccggcgctcaaaagctggggcgagttactggaaaggtggctgtcgagtttcgtagagaacacaaagtag

SEQ ID NO: 146 - protein, 254 aa, Unknown
  Obtained from environmental sample
MPELKPLWPNNQRPTVSLQEWRAPKPNGTGVLVCPGGGYGALATGHEGDDIARYLNERGFDAWVLRYTIASAQTPGPLLEKPLADAQRALRQIHYGPNAPQKLGIWGFSAGGHLAATVSTQWQKPIEDAPPLRPDFSILAYPVITMDAWTHGGSRHNLLGPTPTPEQIERFSNERQVNAQTPPTFLFHTADDGAVPVENALRYALALEKHKVPCELHSYRSGPHGVGLAANHPALKSWGELLERWLSSFVENTK

SEQ ID NO: 147 - DNA, 1275 bp, Unknown
  Obtained from environmental sample
gtgaacgactacttaaacaaacttttgaaaaattcgggtgaaatattgggaacacaacacagtggcgaggtgactgttggaaaacatcgctcgttaaatgttctgtcggtgctcgcggcggttctcgcgctcggcgcggcaatctggattgtcgttcccgcgccgtcttattacgtgtggcttctcgcagtcgcggcgagtgaatggagtttcgcgctcgccgcgctcgctcttttcagcatcgtcgccgcactgttttttgggcgcgggaaaattaaaaccgtgacgatttttaccggcgcgactgcttttttaatttcgctctacccatttgccgacgctttgacgacggcgcgcgaacacaatgtttcgccatcattcggacaatatgcaaccggctttttcgctcgaaacgagaggattgacaaagaaacctttacgttcgcaaccattgacggaaaatcgctcgagcttgatgtttattcgccgcccgccggcgttcaaaaaaacggcgccggcgtcgttgtcgttcacggcggttcgtggaacgcgggcgggcgcggcgattttccccgttggaacggctggctcgccgaaaacggctatacggttttcgacatcgattatcggctcgcgccgcagccgaattatttaacggcgactggtgacgttaaatgcgcggtcggatggataaaaacaaacgcagaacgatttggcatcgcacccgacaaaacaatcttgctcgggcgttcggcgggcgggcatctggcgctgctcgcagcttattcggtaaacgaccggcggcttccttcaagctgcgcgaacgcgaaatccggtgtgagcagcaatgccgccgatgaaaccgtgcgcgcggtcgtatcgttttacgcacccgtcgatttgatttggagtttcgataacccggcaaacgagctggtcataaacggcaaaaaaacgctcgctcaatttctcggcggcaatccgcacgaatcaagtgagatgcgcgaacgctatctgctcgcatcgcccgacacgcacgtcaattcgaacactgcgccgacgctgctcattcacggcgggcaggatcagcttgtcaggacggaaaatatgcacaggcttgccgaaaaattggacgcggaaaaagttccgcacgaaaccgtctctctcggctacgcccagcacggcttcgattataatttcaacggctggggcgcgcaagttgcgcaatcggttctgctcgactttttgcgtaaaaataccgaatccggcaaataa

SEQ ID NO: 148 - protein, 424 aa, Unknown
  Obtained from environmental sample
MNDYLNKLLKNSGEILGTQHSGEVTVGKHRSLNVLSVLAAVLALGAAIWIVVPAPSYYVWLLAVAASEWSFALAALALFSIVAALFFGRGKIKTVTIFTGATAFLISLYPFADALTTAREHNVSPSFGQYATGFFARNERIDKETFTFATIDGKSLELDVYSPPAGVQKNGAGVVVVHGGSWNAGGRGDFPRWNGWLAENGYTVFDIDYRLAPQPNYLTATGDVKCAVGWIKTNAERFGIAPDKTILLGRSAGGHLALLAAYSVNDRRLPSSCANAKSGVSSNAADETVRAVVSFYAPVDLIWSFDNPANELVINGKKTLAQFLGGNPHESSEMRERYLLASPDTHVNSNTAPTLLIHGGQDQLVRTENMHRLAEKLDAEKVPHETVSLGYAQHGFDYNFNGWGAQVAQSVLLDFLRKNTESGK

SEQ ID NO: 149 - DNA, 582 bp, Unknown
  Obtained from environmental sample
atgagcctactcaagatttatgatgatacaatttctggtccatgggaaaccgcagggattgacgtacagtaccggattaaagatggcgtcctgacattccagcagaccgtctcgaaatccgactggctccacaacttcgaaacatgggtaaagccctacaagcgacaacccattccctggtatgctcatgcagggtttgtaaagctctggaaatccgtgcgggatgaagtggcaaagtactacaaagatattcaccggattgccggttacagccaaggttctgcgcttgctcagctcgccgcagaagactactacttcacaaccggaaacgctatcgacacagtaggttttggctgcccgagagtattctggatgcctaacgactatgttcggaaggcacaagaaaaaaccaagttagtgatggtagataatgaccttgttacctgtgtgccatttgctctttggggataccggcacgtggggcaaaagataatacttcctggtactggtttgttaccatcgacaaaggctcattatcctgatgtgtacagatcgagacttgtcgctgaaagtgtgcagtaa

SEQ ID NO: 150 - protein, 193 aa, Unknown
  Obtained from environmental sample
  DOMAIN (26)...(155): Lipase (class 3)
MSLLKIYDDTISGPWETAGIDVQYRIKDGVLTFQQTVSKSDWLHNFETWVKPYKRQPIPWYAHAGFVKLWKSVRDEVAKYYKDIHRIAGYSQGSALAQLAAEDYYFTTGNAIDTVGFGCPRVFWMPNDYVRKAQEKTKLVMVDNDLVTCVPFALWGYRHVGQKIILPGTGLLPSTKAHYPDVYRSRLVAESVQ

SEQ ID NO: 151 - DNA, 1257 bp, Unknown
  Obtained from environmental sample
atgaaaataaagccgctcacgttttcttttggattagcagtcactagctcggtgcaagccttcactcaatttggcggacaaggcgttatgccgatgggtcacgaatggttaacgcgcaccgctgctctcgaggtacttaatgcagagcatatcatcgaagcggatccgaatgacccaagatatacttggcaggacggacttgctaaaaaccttgaacttaataccgcccaatctgaaatcacgcgcttacaatctcatttaaataataacccgctctatgagccgagatacgacggtataaactcagccatcgttggtgaacgctgggtcgatattgcagggtttaacgtcacaacagccagcgcagacccgactggccctaattgctttagcgcagtttcacaagagcccgcagatattcagcaagaccactttatgcgccgctatgatgatattggaggtcaaggtggagttgatgctgcttatcgcgcacagcaacgatttgtgcaacactttgtggatgcggccatggccgaaaaaaaacgactaaaagtatgggacggtggtggccattctgcgttagcagaggtagatcataattactttttatttggtcgtgcggttcacctatttcaagactcatttagtccagaacacacggtacggctccctcaagataactacgaaaaagtttggcaggttaaggcatatctttgctcagagggggctgagcaacattcacacgataccaaagacgtgctcaactttgccagtggcgatgttatttggcaacctcaaacccgactagaagcaggctggcaatcttaccagatcagcagtatgaagcccgttgctattgtggcccttgaagccagtaaagatctttgggctgcgtttattcgcaccatggcgaccccaaaagcacagagacgtaacgtggcaacgcaagaagcccaacaacttgtacaaaactggttgtcttttgatgaggcccagatgctgacttggtatcaagatgagaataagcgtgaccatacttatgtgcttgcccccaatgaaacgggaaaaggaaaatctctggaagcctgtatgacagagctaaaggtaggcactagcagtcaagcagaacgggttgcgcaactggaagccgagcgtaatcaatgcctatacaacattgaggcggaacctggctttgcagacttaaacgatccacacctcgatattccatataactggcgctggaagtctctgacttag

SEQ ID NO: 152 - protein, 418 aa, Unknown
  Obtained from environmental sample
  SIGNAL (1)...(20)
MKIKPLTFSFGLAVTSSVQAFTQFGGQGVMPMGHEWLTRTAALEVLNAEHIIEADPNDPRYTWQDGLAKNLELNTAQSEITRLQSHLNNNPLYEPRYDGINSAIVGERWVDIAGFNVTTASADPTGPNCFSAVSQEPADIQQDHFMRRYDDIGGQGGVDAAYRAQQRFVQHFVDAAMAEKKRLKVWDGGGHSALAEVDHNYFLFGRAVHLFQDSFSPEHTVRLPQDNYEKVWQVKAYLCSEGAEQHSHDTKDVLNFASGDVIWQPQTRLEAGWQSYQISSMKPVAIVALEASKDLWAAFIRTMATPKAQRRNVATQEAQQLVQNWLSFDEAQMLTWYQDENKRDHTYVLAPNETGKGKSLEACMTELKVGTSSQAERVAQLEAERNQCLYNIEAEPGFADLNDPHLDIPYNWRWKSLT

SEQ ID NO: 153 - DNA, 753 bp, Unknown
  Obtained from environmental sample
atggggagagagatgccgtatagggttgttttgcctgcgaagtatgacgagaagaaggacgtccgatatccggtgctctatctgcttcacggcctgacaggcaacaatacgaactggatcgagagaacaaagcttacggagtacctgtccgataccgggctgattgtagtaacacctgaaggcgagaacgggtggtacacggacagtgcgaatgatgcgaatggaaaatatgagagctatatagtttcagaactgataccggaggtcgatcaaaagtttcgaacgatagcggagcgtaaggggcgggcgatcgcggggctttcgatgggaggatatggggcgataaagttcgggttgaaatacccggagatgtttgtgctggcgggaagtttcagtggggcgttaggagccaccggatggccggagacaggcccggggtcggcgggtttggcttcgatccgagccgttttcggaccccaggacagcgaaacacggaaggcaaacgatattttcagaatgatccgggagatggagcctgagaaggcagagggcctgccgtttctttacatcgattgcggcacagaggatattctttttcagaacaaccgggattttgttgatctgctggttcaaaagaagatccggcacgagtatcgccatctgccgggcgggcatacttggttatattgggataagcagataaagccatttcttggcattacggtgtcgttactacacggcccaacatcttag

SEQ ID NO: 154 - protein, 250 aa, Unknown
  Obtained from environmental sample
  DOMAIN (1)...(241): Putative esterase
MGREMPYRVVLPAKYDEKKDVRYPVLYLLHGLTGNNTNWIERTKLTEYLSDTGLIVVTPEGENGWYTDSANDANGKYESYIVSELIPEVDQKFRTIAERKGRAIAGLSMGGYGAIKFGLKYPEMFVLAGSFSGALGATGWPETGPGSAGLASIRAVFGPQDSETRKANDIFRMIREMEPEKAEGLPFLYIDCGTEDILFQNNRDFVDLLVQKKIRHEYRHLPGGHTWLYWDKQIKPFLGITVSLLHGPTS

SEQ ID NO: 155 - DNA, 1689 bp, Unknown
  Obtained from environmental sample
atgggactgttcgattacaaaaatgccgacggcaaagcgctgtacagcgatgccatcgccctgacgctgtatgcctacacgccgaccgggcaggccttgcccggcactggctggaagccgatcggcgccacggcgctgggctatcagggcaaggtcggggtgcagggcacgttcttcggcgagaaggacggcttcaccagcgccgaagccgaagtgctcggcaagtacgacgccgcgggtaagctgatcggcatcggcgtggccttccgcggcaccggcgggctgggttacagcgacaccttcggcgacatgaaaaacaacctgctggctgccattggcccgtcggactacgccactcagtacgcgaaaaacgccttcgacaacctgctcaaatcggtggccgcgttcgctgtcgcccacggcattgcggccaaggacgtacttgtcagcggccacagcctcggcggtctcggggtcaacagcgtggcggagttgagcgcgagcaactggggcgggtttttcaaggacgccaactacatttcgttcgcctcgccgacccagagcagcaccggcacgaacgtgctgaacatcggctacgaaaacgacccggtgttccgcgtgctcgacggcaccacgttcagtaccgcgtcgatgggcaagcacgacaaaccgcacgattcgaccactgacaacatcgtcaacttcaacgacaactacgcgtccaccgcgcagaatctggtgccgttcagcatcgccaacccgctgaactggtcggcccacagctcgctggggtatgccgacggcctgaatcgggtgatcgcgtcgaagttctacggcctgacgcacaaggactcgacgatcatcgtctccaaccttgaggacgcgtcgcggggcaagacctgggtcgaggatctgggccgcagcggcgagccgcacaccggcagcacgttcatcatcggcaccgacagcggcgactggctcaagggcggggcgggcaacgacttcctcgaaggcctgggcggcgatgaccgtttccgtgatgacggcggtttcaacatcctgctcggtggccagggccacaataccttcgagctgcaaaagccgttgcagaacttcagcttcgccaacgacggcgacggcacgctgtacgtgcgtgacgcctacggcggcatcagcatgacccgcgacatcggcgcgctagtgagcaaggagtcgggttcgtggtggggcagcaaggaaatcacctggaccgtcaccgccaaaggcctggccaacggtgccgaactgacccagtacaaccattcgctcagcggcggcgccatgggcgacaccctcaaagccaccgccgacggcgactggctgttcggcctgggcggtaacgatcacctgcaaagcgacaaggcccacgtgaccttcgtcggcggtgccggcaatgacgtgatgagcgcggtgggtggcaacaacaccttcctgttcagcggcgccttcggttttgacgcgatcaatggctaccagggcagcgacaaactggtgttcatgggcgtcgaaggcgcggggcagggctacgactacaagcaacacgcgtcgcagtccggaagcgataccgtgctgaagattggcgactttgccgtgacgctgatcggggtcggtgtggctaacctgtcggattcgagtttcgtcttcgcctga

SEQ ID NO: 156 - protein, 562 aa, Unknown
  Obtained from environmental sample
  DOMAIN (82)...(212): Lipase (class 3)
MGLFDYKNADGKALYSDAIALTLYAYTPTGQALPGTGWKPIGATALGYQGKVGVQGTFFGEKDGFTSAEAEVLGKYDAAGKLIGIGVAFRGTGGLGYSDTFGDMKNNLLAAIGPSDYATQYAKNAFDNLLKSVAAFAVAHGIAAKDVLVSGHSLGGLGVNSVAELSASNWGGFFKDANYISFASPTQSSTGTNVLNIGYENDPVFRVLDGTTFSTASMGKHDKPHDSTTDNIVNFNDNYASTAQNLVPFSIANPLNWSAHSSLGYADGLNRVIASKFYGLTHKDSTIIVSNLEDASRGKTWVEDLGRSGEPHTGSTFIIGTDSGDWLKGGAGNDFLEGLGGDDRFRDDGGFNILLGGQGHNTFELQKPLQNFSFANDGDGTLYVRDAYGGISMTRDIGALVSKESGSWWGSKEITWTVTAKGLANGAELTQYNHSLSGGAMGDTLKATADGDWLFGLGGNDHLQSDKAHVTFVGGAGNDVMSAVGGNNTFLFSGAFGFDAINGYQGSDKLVFMGVEGAGQGYDYKQHASQSGSDTVLKIGDFAVTLIGVGVANLSDSSFVFA

SEQ ID NO: 157 - DNA, 960 bp, Unknown
  Obtained from environmental sample
atgcgcggtttcgcgcgttcaatcacttttcgtttggtgttcgctgcgactgcgttcgtcgttgcgctggcaacgttggcccaggcgcaaaacgacaagatgacacccatcgccacaccggcgcagcccaatgcgatcgagatcggaaccggtccgctgcccgatgcgaagaaccccgagtcctggcatagccagtacggcagcaagtttgcccgtaacgtaaccatagcgacgctgacaccatttctgccggatgctgccagggcaagcggcgccgcagtcatcgtcgcgcccggcggcggtttccgcaccttgtcgatggaaaatgaaggctggaacgttgcgcgcgccctggctgaaaagggcgtcgctgcgttcgtcctgaagtatcgattgaatcagaccccggcggacatgccgggcttcgagcagtccatgcgagaaatgttttcgggaacagcgcgaccgccgcgccccgacccggcgaaggctattgccggtcttgctccgcaaatcgccgacgcccgcgcggcatttgcattaatccgcaagcgttcttccgaatggcacgtcgatcctaaccggatcggcatggttggtttttccgccggcgcgatgttgaccatggcgaccgcgctcgcgggcgaggatgcgaagccggccttcatcggcaacatctacggtccgctcgcgtcagtcaccgtgccggctgacgcgcccccattgttcatcgcgcttgctgccgacgatcctttcttcgcgaacggcggctatgggctcatcgatagctggaagacggcgaagcggcccgttgaattccatctttatgaacagggtgggcatggcttcgggatgtatccgaaggaaacgacgagcaccggctggttcgaagccttcgtgcggtggataggaatgcacggcatgctgaagccggcagcgtcaggaagcggcgcgaagtag

SEQ ID NO: 158 - protein, 319 aa, Unknown
  Obtained from environmental sample
  SIGNAL (1)...(29)
MRGFARSITFRLVFAATAFVVALATLAQAQNDKMTPIATPAQPNAIEIGTGPLPDAKNPESWHSQYGSKFARNVTIATLTPFLPDAARASGAAVIVAPGGGFRTLSMENEGWNVARALAEKGVAAFVLKYRLNQTPADMPGFEQSMREMFSGTARPPRPDPAKAIAGLAPQIADARAAFALIRKRSSEWHVDPNRIGMVGFSAGAMLTMATALAGEDAKPAFIGNIYGPLASVTVPADAPPLFIALAADDPFFANGGYGLIDSWKTAKRPVEFHLYEQGGHGFGMYPKETTSTGWFEAFVRWIGMHGMLKPAASGSGAK

SEQ ID NO: 159 - DNA, 1002 bp, Unknown
  Obtained from environmental sample
atggatgccaataaagacggtgagatttcggttgaagaactgcaggcggtccggagccagttgccaagcgatctgctggccatgttggacgtcgctttatcaacccagagcactaattccggcaaatctgaaatcgccaattctgcgccgatgaaagcagctgtccccgaacggaaggggcctacaccattccttgatccgatgttcaagttcactgtaaccaagaacattcagtatgctacggcaaaaaacggagacacagagatgccgctgcttctggatatttaccgcccaaccgccgctaccaatttgccgaaaaaattgccggccgtgattttcctcttcggaggaggttggataaaaggaagcaaagacgtcaaatacatcaaggatttgtgtgaatactacgcgactcgcggctatgtggccttttcgattcaataccgcatccaaagagacaatcccccggcactgcctggaccagccccgtctcctgagaccaatgaaagataccggctgatgaatgccgcgattcacgacaccgcagatgccgttcgctgggtcagggccaatgccaacaaatacgatattgacccggatcgaatcgccatcgggggagtttccgccggagccttcaattcgctctacacgggcttctgtggtgaggacatcgtcggtcccaatgccaaagtggctgcagtgatctcgcttatgggcgtgattgaaactaagcatatagacaagaacgaccccccggtgtttatcgcccatggcacctcggataatttagttccctacgccatggtcgggagcgcggtgaagcggttgaatgaagttaaagcaaaatatgctttctatccggtagaaggtgtagctcatcgcattcaaaccattcttgatacagagtttgatgggaagacagtcagagatcacagtgttgatttctgtttcacggccatgaagctgtctgaaattattagaaagatagataacaatgaatga

SEQ ID NO: 160 - protein, 333 aa, Unknown
  Obtained from environmental sample
  DOMAIN (93)...(312): Phospholipase/Carboxylesterase
MDANKDGEISVEELQAVRSQLPSDLLAMLDVALSTQSTNSGKSEIANSAPMKAAVPERKGPTPFLDPMFKFTVTKNIQYATAKNGDTEMPLLLDIYRPTAATNLPKKLPAVIFLFGGGWIKGSKDVKYIKDLCEYYATRGYVAFSIQYRIQRDNPPALPGPAPSPETNERYRLMNAAIHDTADAVRWVRANANKYDIDPDRIAIGGVSAGAFNSLYTGFCGEDIVGPNAKVAAVISLMGVIETKHIDKNDPPVFIAHGTSDNLVPYAMVGSAVKRLNEVKAKYAFYPVEGVAHRIQTILDTEFDGKTVRDHSVDFCFTAMKLSEIIRKIDNNE

SEQ ID NO: 161 - DNA, 1851 bp, Unknown
  Obtained from environmental sample
atgcccgttttcgattaccgacagctcgacagcactgcctcttcctcgctctataaagatgccatggccctggccacctatgcctaccatggcatcgacgatggcttcagcgccggctaccagaagcacggcttcggcctgggcctgccggccaccctggtcaaggcgctgatcggtggcaccgacagccagggtgtgatccccggcatcccctggaaccccgactccgaagcccgcgccctggcccaggtcaaggccgccggctggacgccgatcagcgcggcgcaactgggctaccagggcaagaccgacggccgtggcaccttccacggcgaagcgccgggctacacctcggcgcaggtggaaatcctcggccgctacgatgccgccggccaactcagcggcatcggcatcgcctttcgcggcaccagtgggccgcgcgagaacctgctgggcgacaccatcggcgatgccatcaacgacctgttggcggcgatcggtccggccggttatgcccgtgactacgccggtaacgcattcgggcaactgctcgccgatgtggcggccttcgccaaggccaacggcctgagcggcgccgatgtcaccgtcagtggccacagcctcggcggcctggcagtcaacagcctggccgacctcagtggctcgcgctggggcggcttctaccaggatgcgcgctacgtcgccttcgcctcgccgacccaggccgccgatgccagcaaggtgctcaatatcggctacgaaaacgacccggtgttccgcgtgctcgacggcacctcggcgacctggggcaccctgggcgtgcacgacggcgccaaggcctcggccaccaacaacatcgtcaacttcaacgatcactacgcctccgacgcctggaacctgctgccgttctccatcggcaacatcgccacctggctgtcgcacctgccgacggcctacgccgatggccttggccgggtgctggggtcgtcgttctatcaatggaccagccgcgactcgaccatcgtggtcagcaacctgtccgatgtcacccgtggctcgacctgggtcgaggacctcaaccgcaatgccgagccgcacaagggcagcaccttcatcatcggttccgagcaggacgacctgatccacggcgggcgcggcaacgactacctcgaggggcgggccggcaacgacaccttccgcgatgacggtggcttcaacctgatcgacggcggcgccggccatgacaccctgaagctgcaggacgccctggccaacctgagcatcgcccgggacggcgagggcatgctgtacgtgcgtgacgcccagggcggcatcagcctggtgcgcaatgtcgagaacctggtgagcaaggagtcgagcctgctgatcttcagcaaggaggtcagccacggggtcgcggcgcagggcctgttcgagagcggcaaggtcacgccctacgcatcgacgctcaatggcacccaggccggcgaccagctggtggccggcaaccagggccagtggctgtttggcctgggcggtgacgatcggctgcagggcggcgccggcaatgacgtgctggtgggtggcgcgggcaacgatgtgctcattggcggcgcggggcgcgacaccttcctgttcagcgagcatttcggccaggaccgggtgctggacttcaccgggcaggaccggctggtgttcattggcgtggacggtggtacggcggcgccggactggcgtgcccatgccagccaggttggcgatgacctggtactgaagttcggcggggacagcgtgacgctggtggggatctcggcccagggggtgggggatgggcagatcgtgattgcctga

SEQ ID NO: 162 - protein, 616 aa, Unknown
  Obtained from environmental sample
  DOMAIN (527)...(544): Hemolysin-type calcium-binding repeat (2 copies)
  DOMAIN (382)...(399): Hemolysin-type calcium-binding repeat (2 copies)
  DOMAIN (133)...(266): Lipase (class 3)
MPVFDYRQLDSTASSSLYKDAMALATYAYHGIDDGFSAGYQKHGFGLGLPATLVKALIGGTDSQGVIPGIPWNPDSEARALAQVKAAGWTPISAAQLGYQGKTDGRGTFHGEAPGYTSAQVEILGRYDAAGQLSGIGIAFRGTSGPRENLLGDTIGDAINDLLAAIGPAGYARDYAGNAFGQLLADVAAFAKANGLSGADVTVSGHSLGGLAVNSLADLSGSRWGGFYQDARYVAFASPTQAADASKVLNIGYENDPVFRVLDGTSATWGTLGVHDGAKASATNNIVNFNDHYASDAWNLLPFSIGNIATWLSHLPTAYADGLGRVLGSSFYQWTSRDSTIVVSNLSDVTRGSTWVEDLNRNAEPHKGSTFIIGSEQDDLIHGGRGNDYLEGRAGNDTFRDDGGFNLIDGGAGHDTLKLQDALANLSIARDGEGMLYVRDAQGGISLVRNVENLVSKESSLLIFSKEVSHGVAAQGLFESGKVTPYASTLNGTQAGDQLVAGNQGQWLFGLGGDDRLQGGAGNDVLVGGAGNDVLIGGAGRDTFLFSEHFGQDRVLDFTGQDRLVFIGVDGGTAAPDWRAHASQVGDDLVLKFGGDSVTLVGISAQGVGDGQIVIA

SEQ ID NO: 163 - DNA, 1854 bp, Unknown
  Obtained from environmental sample
atgggtgtgtatgactacaagaacttcggcacagcagactccaaggcgttgttcagcgacgccatggcgatcacgctgtattcctatcacaacctcgacaacggtttcgccaccggttaccagcaaaacggcttcggcctgggcttgccggcaaccctggtcaccgcgctgatcggcggcaccgattcccagggcgtcattcccggcattccctggaaccccgattcggaaaaggctgctctcgaagccgtgcaaaaagccggctggacgccgatcaccgccgcgcaattgggctatgacggcaagaccgacgctcgcggaaccttcttcggcgagaaggacggttacaccagcgcccaagtggagatcctcggcaagtacgacgcccagggtcatctcaccgaaatcggcatcgcttttcgcggcaccagtggcccgcgggaaatccagatcggcgactccatcggtgatgtgatcaacgacctgatggcagcgctagggccaaaggattatgcgaaaaactacgtaggtgaagccttcggcaatctgctcagtgacgttgcagcgtttgcccaggccaatgggctttcgggcaaggacgtactggtcagcggccacagcctcggcgggttggcggtcaatagcctggcggacttgagcagcgataagtggtccggtttttaccaggattccaactacatcgcctatgcctcgccgacccaaagcagcagcgacaaagtgctgaacatcggttatgaaaacgacccggtgttccgcgccctcgatggctcgtcgttcaacctggcctcggtaggcgtgcacgatgccgccaaggattcgacgaccgataacatcgtcagcttcaacgaccactacgcctcgacggcgtggaacgtgctgccgtattccatcctcaacatccccacctggatctcgcacttgcccaccggttacggcgacggcatgacccgggtgctggagtcgcagttctacgacctgaccagcaaggattcgaccatcatcgtcgccaacctctcggacccggcgcgcagcaacacctgggtccaggatttgaaccgcaacgccgaaacccataaaggcagcaccttcatcatcggcagcgacggcaatgacctgatccagggcggcaagggcagcgactacctggaaggccgcgacggtaacgacaccttccgcgatagcggcggctacaacatcctgttgggcggcaagggcagcaacgtgctggacctgcaggagtcggtgaagaactttgtcttcgccaatgacggtgccggcaacctgtacgtgcgcgacgccaatggcggcatcagcatcactcgcgacatcggcagcatcgtcaccaaagagccgggttttctctggggggtgttcaaggatgacgtgacccacagcgtcaccggcaatggccttgtgaccggcagcaacctgacccagtacgcctcaagcgtgaagggcacgaccggcgccgacaccctcaatgcgcacgcaaccggcgactggatgtttggcttcgatggcaacgaccatttgatcggcagcaccggcaacgacgtgtttgtcggcggggcgggtaatgacctgctggtatcaggcggcggggtcgacacgttcctgttcagcggggcgtttggccaggatcgggtggtgggctatcaagccaatgacaaactggtattcctaggggttcagggcgttgcgccgaacgatgactaccgggcccatgccacggcggtagggcaggatacgttgctgacgtttggcagtgattcggtgaccctggtgggtgtcgggctggacagtttgtccggtggggggattgtaatcgcctga

SEQ ID NO: 164 - protein, 617 aa, Unknown
  Obtained from environmental sample
  DOMAIN (133)...(265): Lipase (class 3)
MGVYDYKNFGTADSKALFSDAMAITLYSYHNLDNGFATGYQQNGFGLGLPATLVTALIGGTDSQGVIPGIPWNPDSEKAALEAVQKAGWTPITAAQLGYDGKTDARGTFFGEKDGYTSAQVEILGKYDAQGHLTEIGIAFRGTSGPREIQIGDSIGDVINDLMAALGPKDYAKNYVGEAFGNLLSDVAAFAQANGLSGKDVLVSGHSLGGLAVNSLADLSSDKWSGFYQDSNYIAYASPTQSSSDKVLNIGYENDPVFRALDGSSFNLASVGVHDAAKDSTTDNIVSFNDHYASTAWNVLPYSILNIPTWISHLPTGYGDGMTRVLESQFYDLTSKDSTIIVANLSDPARSNTWVQDLNRNAETHKGSTFIIGSDGNDLIQGGKGSDYLEGRDGNDTFRDSGGYNILLGGKGSNVLDLQESVKNFVFANDGAGNLYVRDANGGISITRDIGSIVTKEPGFLWGVFKDDVTHSVTGNGLVTGSNLTQYASSVKGTTGADTLNAHATGDWMFGFDGNDHLIGSTGNDVFVGGAGNDLLVSGGGVDTFLFSGAFGQDRVVGYQANDKLVFLGVQGVAPNDDYRAHATAVGQDTLLTFGSDSVTLVGVGLDSLSGGGIVIA

SEQ ID NO: 165 - DNA, 309 bp, Unknown
  Obtained from environmental sample
atggaacgctgccatgacatagtgcatcaccctctcgctgtcggcgagaaacgaaatatgacggcgccatttgatgtacgccttgatgagcaggcggactatgaacaggcgaagcatgtcgtgcaaccagatatctccgtcatttgcgatcaaagccaaattggcagccgaggctgcgatggtccgcctgacttggtagtggaagtgctttcgccaagtacagcgttgaaagatcgaaacgaaaagtatatgttgtacgaacagtttggcgtcaaggaatattggatcgtggatccaaagaattcaaaa

SEQ ID NO: 166 - protein, 103 aa, Unknown
  Obtained from environmental sample
MERCHDIVHHPLAVGEKRNMTAPFDVRLDEQADYEQAKHVVQPDISVICDQSQIGSRGCDGPPDLVVEVLSPSTALKDRNEKYMLYEQFGVKEYWIVDPKNSK

SEQ ID NO: 167 - DNA, 936 bp, Unknown
  Obtained from environmental sample
atggatccacaggtgcaggctctcctccaggtgatggaggcccaggcacaggcgacgggtgctcccccgctgtgggaacaggacccggcggtcgcccgggcgcaggcggaactcgggttcgctgccttcaacgcaccgatgcccctgaccgtggcgatcgaagacaggaagatcccaggtccgggcggcgaggtcggtctcaaggtgttcacgccgcagggcgaagggccgttcccgctgttggtttatatccacggcggcggctgggtcatcggtagcgcggccacccacatgaagctctgcgcggagctcgcggagggggccgactgcgtggttgccagcgtcgattaccggctggcgcccgaataccccgcgccggctgcgctcgacgactgcatggcggccattcgctgggcggtcgaacacgccgccgaactcagggcggacggcggacggttcgcgatcggtggcgattcggccggcgggaacctcacggctgcggcctgcctgcggctgcgcgacgagggcggtccccggccgcgcctccaactactcctctacggcgccttccatcacaacgtggatacgccgtcggcgatagcgaacggggagggctacatccttacccgccaggcgatgatctggttctggaaccactacctttctggcggcgccgacgagcgcgatccgtacatctccccggcctacggagacctcagtggtctgccgccggcccatttcattgtcgggacgctggaccctctcctggacgactcgaagctgtacgcgaagaagcttcaagaggcgggagtgccggcgacgctctccatctacgaagacatgccgcacgtgtttctgcagctttcgtcggtgattgacggcggcaagcgcggagtggcggaggcctgtgaagcgttgaagtcggccttcgcgtga

SEQ ID NO: 168 - protein, 311 aa, Unknown
  Obtained from environmental sample
MDPQVQALLQVMEAQAQATGAPPLWEQDPAVARAQAELGFAAFNAPMPLTVAIEDRKIPGPGGEVGLKVFTPQGEGPFPLLVYIHGGGWVIGSAATHMKLCAELAEGADCVVASVDYRLAPEYPAPAALDDCMAAIRWAVEHAAELRADGGRFAIGGDSAGGNLTAAACLRLRDEGGPRPRLQLLLYGAFHHNVDTPSAIANGEGYILTRQAMIWFWNHYLSGGADERDPYISPAYGDLSGLPPAHFIVGTLDPLLDDSKLYAKKLQEAGVPATLSIYEDMPHVFLQLSSVIDGGKRGVAEACEALKSAFA

SEQ ID NO: 169 - DNA, 933 bp, Unknown; identical to SEQ ID NO: 19
  Obtained from environmental sample

SEQ ID NO: 170 - protein, 310 aa, Unknown; identical to SEQ ID NO: 20
  Obtained from environmental sample
  SIGNAL (1)...(24)
  DOMAIN (44)...(289): alpha/beta hydrolase fold

SEQ ID NO: 171 - DNA, 735 bp, Unknown
  Obtained from environmental sample
atggaagcgaaaaccgtacagacgccgcatgtgcccgtccgctacttcgagggcgggaaaggcgagcccctcgtcttcctgcatggcgcgggcggcattaccgccgaagacccgttccttgcgaagctcgcggagacatatcacgtctacgcgccgctgctgccgggctatggcgactcggaggaatgcggcgagttgcgcgagatgctcgacatcacgctccacacatgggacgtcgtcgaagcgctcggccttaagaacccgatccttgtcggccattcgatgggcggcatgatcgcggcggagatggccgccgtcgcgccgaacgacgtgtcgcgcctcgggctcatctgcccggcgggactctggctcgacgagcatcccattcccgacatcttcgcgatgctgccatacgagcttccggcggttctcttccacgatgtggaagccggcacggcgctgatgacggcgggcgtcgcgctcgacgatccggaatggctgaagggcttcctcgtccagaatgcgcgccaactcggcatggcggggaaaatcctcttccccgtgccggatcgcgggctctcgcaacggctctaccgcgtgaaggcgaagacggtgctcgtctggggcgacggcgacaagctgatcgtgcctgcctatgcccatgcgtggaagaaggcgatcaggcaagcggaactcgtctcgatcccggaggcgggccacctgatgacgctctaa

SEQ ID NO: 172 - protein, 244 aa, Unknown
  Obtained from environmental sample
  DOMAIN (47)...(244): alpha/beta hydrolase fold
MEAKTVQTPHVPVRYFEGGKGEPLVFLHGAGGITAEDPFLAKLAETYHVYAPLLPGYGDSEECGELREMLDITLHTWDVVEALGLKNPILVGHSMGGMIAAEMAAVAPNDVSRLGLICPAGLWLDEHPIPDIFAMLPYELPAVLFHDVEAGTALMTAGVALDDPEWLKGFLVQNARQLGMAGKILFPVPDRGLSQRLYRVKAKTVLVWGDGDKLIVPAYAHAWKKAIRQAELVSIPEAGHLMTL

SEQ ID NO: 173 - DNA, 1578 bp, Unknown
  Obtained from environmental sample
atgagatcagcagctcgcatcagcgtggcggcagttgcctttctttgcctgctcttgacgactcgggtttccgcccagatcgtgccggcgatggaatgtgcggatctggcgaatcagcagcttcccaacacgacgatcacctcggcccagaccgtcaccaccggatcgttaacgcccccgggctcgacgaatccgatcaccgacctgcctcctttctgccgtgtcacaggcgccatcgccccgacgagcgagtcgcacatcctcttcgaggtctggctgccgctggataaatggaacggcaagttcgccggcgtgggcaacggcggctgggccggcatcatctccttcggcgccctcggaagccagctcaggcgcggctacgcgaccgcctccacgaatacgggtcacgaagcggcgccggggatgaacgcagccaggtttgcgttcgagaagccggagcagcttatcgacttcgcctatcgctcccagcacgagacggccctgaaagcgaaggcgctggttcaggctttctacgggaagccgccggaacactcctatttcatcgggtgctcatcgggtgggtaccagggcctgatggaggcccaacgatttccggccgactacgacgggatcgtcgccggtatgccggcgaacaactggacacggctgatggccggcgacttggacgcgatccttgccgtctccgtagatcctgccagccaccttcccgtctccgcattgggtctgttgtatcgctcggtgctcgctgcctgcgacggcatcgacggtgttgtagacggtgttctggaggatccgcgccgatgccggttcgacccggccgtgttgatgtgcaaggcggatcagaatcccgatggctgccttacgccggctcaggtggaagcggcacggcgcatatacggcggtctgaaggatcccaagaccggcgctcagctctatccggggctggcgccgggaagcgagccgttctggccgcaccgcaatccggcgaatccgttccctattccgatcgcgcactacaagtggctcgtctttgccgatccaaactgggattggagaacattcaagttcacggatccggcggactaccaggctttcctcaatgcggaagccacgtatgcccctactctcaatgcgaccaatccggacctccgggagttcagccggcgcggcggcaggttgattcagtaccatggctggaacgatcagctgattgccccgcaaaacagcatcgactattacgagagcgtcctttcgttcttcgggtccggcaaacaggatcgagcgcagaccgtgcgcgaggttcagagcttctaccggctgttcatggcgccgggtatggctcactgtggaggcggtacaggtccgaactcatttgacatgctggatgccctcgagaagtgggtggaaggcgggatagcgccggaacgagtccttgcgacgcgttccataaacggcgtagtcgaccggctgcgcccgctctgtccatatccgcaggtcgccgtgtacaagggtcatggggatacaaacgacgccgcgaacttcgtctgtcgcgattag

SEQ ID NO: 174 - protein, 525 aa, Unknown
  Obtained from environmental sample
  SIGNAL (1)...(25)
MRSAARISVAAVAFLCLLLTTRVSAQIVPAMECADLANQQLPNTTITSAQTVTTGSLTPPGSTNPITDLPPFCRVTGAIAPTSESHILFEVWLPLDKWNGKFAGVGNGGWAGIISFGALGSQLRRGYATASTNTGHEAAPGMNAARFAFEKPEQLIDFAYRSQHETALKAKALVQAFYGKPPEHSYFIGCSSGGYQGLMEAQRFPADYDGIVAGMPANNWTRLMAGDLDAILAVSVDPASHLPVSALGLLYRSVLAACDGIDGVVDGVLEDPRRCRFDPAVLMCKADQNPDGCLTPAQVEAARRIYGGLKDPKTGAQLYPGLAPGSEPFWPHRNPANPFPIPIAHYKWLVFADPNWDWRTFKFTDPADYQAFLNAEATYAPTLNATNPDLREFSRRGGRLIQYHGWNDQLIAPQNSIDYYESVLSFFGSGKQDRAQTVREVQSFYRLFMAPGMAHCGGGTGPNSFDMLDALEKWVEGGIAPERVLATRSINGVVDRLRPLCPYPQVAVYKGHGDTNDAANFVCRD

SEQ ID NO: 175 - DNA, 864 bp, Unknown
  Obtained from environmental sample
atgaagctcgttttcggcgcgctggcgctcgccctcgtcggcagcggcgcctcgctggcgccggcccagacgaatgcggtgtcggtgcccgcgccgaagccttttgcctcgacgcgcttttcggtcgaggtgaccgggaccggccccgacgttatcctcatccccgggctcactgcctcgcgggaagtgtggcggggcagcgtcaatgccgtgccgggctaccgctatcacctgattcaggtggcgggcttcgccggcactcccgcgcgcggcaacgcgcagggggcggtcgtcgcgccgctcgcggacgagattgcccgctacatagccgccaagggtctgcagcgcccggcgctggtcggccactcgatgggcggtacgctggcgatgatgattgccgcccggcacccctcgcgcgtcggcaaggtgatggtggtcgacatgctcccgcagccggccggcatcctcggttcctcggcggggggaatgcgcggcctcgccgacacgctgcgcaacatcagcgcctctcccggcggacgccggctggtcgaatcggccattcgcctgttcggcaatgagcaggccgaaggcacgcgcagcgatcccgatgtcgtcgcgcgcgccacccacgagctcgccgtccttgaccttacgccggagctgccgaggatccgcgctccgcttaccgtgctctacgcctccctcgacgagacccgccgcgccacgaccgaccgcgcctacgccgccggctatgccccgaggcccggcgcgaagctgatccggatcgacgggagcggccacatgatcatgtacgatcagccggcgaagttccgctccgcgctgaaggccttcctcgccaattaa

SEQ ID NO: 176 - protein, 287 aa, Unknown
  Obtained from environmental sample
  DOMAIN (74)...(283): alpha/beta hydrolase fold
MKLVFGALALALVGSGASLAPAQTNAVSVPAPKPFASTRFSVEVTGTGPDVILIPGLTASREVWRGSVNAVPGYRYHLIQVAGFAGTPARGNAQGAVVAPLADEIARYIAAKGLQRPALVGHSMGGTLAMMIAARHPSRVGKVMVVDMLPQPAGILGSSAGGMRGLADTLRNISASPGGRRLVESAIRLFGNEQAEGTRSDPDVVARATHELAVLDLTPELPRIRAPLTVLYASLDETRRATTDRAYAAGYAPRPGAKLIRIDGSGHMIMYDQPAKFRSALKAFLAN

SEQ ID NO: 177 - DNA, 798 bp, Unknown
  Obtained from environmental sample
atgttcccacgtgtcataaatatcacggtgcttctgcttgtgtctgcaggcagcaccttcgcgcaatccaccgcgccctcgacgcaagccgacacgcgcggcaggctgtatctgattcatcttcccggcatcggcgggttgatgcgaatcgaccggctgctgaccagcggcctgaccaacggcggcatcgacgctgagatcaccatttacgactggaccaacggcaatcccggcctgcccgcgctgggcgcgctggagcgcaacaagaccgaggcaaagaaagtcgctcagatgatcatcgatcgactcgaggccgagccggaagcgaagatcattctgacctgccacagcggcggggcgggcatcgcagtgtgggcgctggagagccttcccgagagcgtgcggatcgacacgctgctcatgctggcgccggcgctgtcgccacagtacgatctcagcgcagctttgcggcgtgtgaagaatcacgcctattcattcaacagcgaattcgacccgattctcggcccgggaacccgcaccttcggcacgatcgaccggataaggaccgacgcggcgggaaaagtcggctttgaggttcccgaccaggctgacgcggcgcagtatgccaagctggtgcagattccttatgaccggcagtggatgtcgctgggccatgccggcgagcacatcggtccgatgatgcccaggttcgccgcgcgggtgatcgcgccgctgctgctgaatggcgagctgccgcagccgacgacgcagccggcgagcacggttcccgctcgatga

SEQ ID NO: 178 - protein, 265 aa, Unknown
  Obtained from environmental sample
  SIGNAL (1)...(21)
MFPRVINITVLLLVSAGSTFAQSTAPSTQADTRGRLYLIHLPGIGGLMRIDRLLTSGLTNGGIDAEITIYDWTNGNPGLPALGALERNKTEAKKVAQMIIDRLEAEPEAKIILTCHSGGAGIAVWALESLPESVRIDTLLMLAPALSPQYDLSAALRRVKNHAYSFNSEFDPILGPGTRTFGTIDRIRTDAAGKVGFEVPDQADAAQYAKLVQIPYDRQWMSLGHAGEHIGPMMPRFAARVIAPLLLNGELPQPTTQPASTVPAR

SEQ ID NO: 179 - DNA, 924 bp, Unknown
  Obtained from environmental sample
atgactctattgttaggggttttcgtaccgctgcagccatcacatgctactgaaaattatctaaatgattttaaactgttgcaacataatgtatttttattgcctgaatcagtttcttattggggtcaggacgagcgtgcagattatatgagtaatgcagattacttcaagggacatgatgctctgctcttaaatgagctttttgacaatggaaattcgaacatgctgctaatgaacttatccacggaatatccatatcaaacgccagtgcttggccgttcgatgagtggatgggatgaaactagaggaagctattctaattttgtacccgaagatggcggtgtagcaattatcagtaaatggccaatcgtggagaaaatacagcatgtttacgcgaatggttgcggtgcagactattatgcaaataaaggatttgtttatgcaaaagtacaaaaaggggataaattctatcatcttatcagcactcatgctcaagccgaagatactgggtgtgatcagggtgaaggagcagaaattcgtcattcacagtttcaagaaatcaacgactttattaaaaataaaaacattccgaaagatgaagtagtatttattggtggtgactttaatgtgatgaagagtgacacaacagagtacaatagcatgttatcaacattaaatgtcaatgcgcctaccgaatatttagggcatagctctacttgggacccagaaacgaacagcattacaggttacaattaccctgattatgcgccacagcatttagattatatttttgtggaaaaagatcataaacaaccaagttcatgggtaaatgaaacgattactccgaagtctccaacttggaaggcaatctatgagtataatgattattccgatcactatcctgttaaagcatacgtaaaataa

SEQ ID NO: 180 - protein, 307 aa, Unknown
  Obtained from environmental sample
  DOMAIN (24)...(306): Endonuclease/Exonuclease/phosphatase family
MTLLLGVFVPLQPSHATENYLNDFKLLQHNVFLLPESVSYWGQDERADYMSNADYFKGHDALLLNELFDNGNSNMLLMNLSTEYPYQTPVLGRSMSGWDETRGSYSNFVPEDGGVAIISKWPIVEKIQHVYANGCGADYYANKGFVYAKVQKGDKFYHLISTHAQAEDTGCDQGEGAEIRHSQFQEINDFIKNKNIPKDEVVFIGGDFNVMKSDTTEYNSMLSTLNVNAPTEYLGHSSTWDPETNSITGYNYPDYAPQHLDYIFVEKDHKQPSSWVNETITPKSPTWKAIYEYNDYSDHYPVKAYVK

SEQ ID NO: 181 - DNA, 1014 bp, Unknown
  Obtained from environmental sample
gtggcggtggctcgccatcctgctggagccaagcccgcccaaaactcgatcggaggtgccgtgatggccctggacccgcaagcgcagatggttctcgacctcgtcctcaactcgggacggccgccctaccaccagctgtcgccgaaggacgctcggcagatgttccgcgagacccgcccggcgtcgaccccgacgccgccggcgattggcgccgtccgcgacgaggtcgcgaacacggcctcggggccgatcccgctgcgggtgtacaggcccgccggcgcggcgccggatgctgctctccccgggctcgtcttcttccacggcggcggctgggtgatcggcgacctcgatacccatgacgtgctctgccgccagctcaccgcggccgcggggctcaccgtcgtctccgtggattaccggctcgcgcccgagcacccgttcccggccgcggtcgacgacgcctgggccgctatacgctgggtcgtcgagcgcgcgaactacctcgggatcgatgcgcgccagctcgccgtcggcggggacagcgccggtggcaacctcgccgccgtcatgacgctgctcgcgcgtgatgcgggggcgccgtcgatcgcctaccaggtgctgctctatcccgtgaccgacgttggggccgaggcgccgtcgtatgaggccttcgccgatggctacctgttgacccgcacggggatgcgctggttcatcgagcactacctgccgtcccggcgcgacgccactgactggcgcgtctcgccgctgcgcgcgccctcgctcgcggggctgccgcccgccctgatcgtgacggccgggttcgatccgctctgcgaggagggagaggcgtacgcccgcgggctccgcgctgcgggcgtccgcgtggactacgtgtgctacggcggcatgatccacgggttcgtgcccatggggcgcctcatcgagacgggcaaccgcgccgtcgcacatatcgcggcctcgctgcgcgaggcccttcgcgcggccgggtga

SEQ ID NO: 182 - protein, 337 aa, Unknown
  Obtained from environmental sample
MAVARHPAGAKPAQNSIGGAVMALDPQAQMVLDLVLNSGRPPYHQLSPKDARQMFRETRPASTPTPPAIGAVRDEVANTASGPIPLRVYRPAGAAPDAALPGLVFFHGGGWVIGDLDTHDVLCRQLTAAAGLTVVSVDYRLAPEHPFPAAVDDAWAAIRWVVERANYLGIDARQLAVGGDSAGGNLAAVMTLLARDAGAPSIAYQVLLYPVTDVGAEAPSYEAFADGYLLTRTGMRWFIEHYLPSRRDATDWRVSPLRAPSLAGLPPALIVTAGFDPLCEEGEAYARGLRAAGVRVDYVCYGGMIHGFVPMGRLIETGNRAVAHIAASLREALRAAG

SEQ ID NO: 183 - DNA, 924 bp, Unknown
  Obtained from environmental sample
atggcttccattcaatctcgtattttcactgggttattgcgtattgcgtcaggctaccgctctcgaagcgatcgcacctccgcgcaaacagccgtgaacaagtcccgtgcctttacgcggctgatgaccttgccccagcttccgggaacgcgatccatccacgccgacattccgaaccttcgcgcaacgtggcatgtggggaagcacgtacgggacgatgtgcgcatcgtctatttccacggcggagcctataccgcagggtctgtcgcgacgcatcgacacttcacctcgatgctcgcaaaactcagccatatccccgtgctttctgtcgactatcgcctcgcaccagaacatccttttcctgcgggctttgatgatgcaattgccgcctatcaatgggccaaagagcacgggccagtaggaaagagcgaagcgcaacatatcgtaattgcaggtgattctgcgggcggaggcctcagtgcggcgatcgcgatgcaactgcgcgatgcaggacagctcctagacggcggcctcatgctgctttcgccgtggatggatctgacctgtagctccggcgcagaacatcgcatcggacatcttgatgccatgctcaatgcggaccacgcgcgtatcatggcgagtctttacgcaggaacccatgacttgaccgacccacgactttcgccgctttatggagactttgcgggtcttccgcccatgttcgtcgccattggcggacgagaaatcgtgctcgatgaggtggttcatgcccttgaaaaagcgcgcgcagcgggcgtggaagttaccctcgaacgtaatgaagaaatgttccacgtttggccagtgatgttccatctcgtccccgaaggacgcgcaagcttagagcgcatggtcgattggctgaattggaagtttcctgcatag

SEQ ID NO: 184 - protein, 307 aa, Unknown
  Obtained from environmental sample
MASIQSRIFTGLLRIASGYRSRSDRTSAQTAVNKSRAFTRLMTLPQLPGTRSIHADIPNLRATWHVGKHVRDDVRIVYFHGGAYTAGSVATHRHFTSMLAKLSHIPVLSVDYRLAPEHPFPAGFDDAIAAYQWAKEHGPVGKSEAQHIVIAGDSAGGGLSAAIAMQLRDAGQLLDGGLMLLSPWMDLTCSSGAEHRIGHLDAMLNADHARIMASLYAGTHDLTDPRLSPLYGDFAGLPPMFVAIGGREIVLDEVVHALEKARAAGVEVTLERNEEMFHVWPVMFHLVPEGRASLERMVDWLNWKFPA

SEQ ID NO: 185 - DNA, 1425 bp, Unknown
  Obtained from environmental sample
atgggtatctttgactataaaaacctcggtaccgaggactccaaggcgctgttcgccgatgccatggcgatcacgctgtattcctaccacaacctggataacggctttgccgtcggctaccagaacaacggcctcggcctgggcttgcccgccacgctggtcagcgcgctgattggcggcagcaacgcccaaggggtcatccctggcatcccctggaaccccgactcggaaaaggccgccctcgacgcggtgcagaaagccggctggacgcctatcagcgccagtaccctgggctacagcggcaaggtcgatgcgcgcggcaccttctttggcgaaaaattcggctacggcacggcgcaggccgaggtgctgggcaagtacgatgacgctggcaagttgttggaactcggcatcagttttcgcggcacttcggggcctcgggaaagcgtggtcaccgactccatcggcgacgtgatcagcgacctgctcgccgccttcgggcccaaggattatgccaagaactacgcgggggaagcctttggcggcttgctcaagaacgtggcggactacgccagcgcccacggcctgagcggcaatgacgtcgtggtcagcggccacagcctgggggggctggcggtcaacagcatggccgatttgagcgacagcacctggtcggggttttataaggactccaactacgtggcctatgcttcgccgacccaaagcgccggcgacaaggtgcttaacgtcggctatgaaaacgacccggtgttccgcgccctggatggctcgtcattcaacctgtcgtccctgggcgtgcacgacaaaccccacgaatcgagcaccgacaacatcgtcagcttcaacgaccactacgcctcatccctgtggaacgtgctgccgttttccatcctcaacctgcccacctgggtctcgcacttgcccaccggttacggcgacggcatgacccgcatcctcgattcgggcttctacgagcagatgacccgcgactccacggtgatcgtcgccaacctgtccgaccctgcacgggccaccacctgggtgcaagacctcaaccgcaatgccgaggcgcacaagggcaataccttcatcatcggcagtgacggcgacgacctgatcaaaggcggcaggggcgcggactttattgaaggcggcaagggcaatgacacgatccgcgacagcagcgggcataacacgtttttgttcagcgggcagtttggcaacgaccgggtgattggctatcaggcgacggacaagctggtgttcaacgacgtggcgggcagcaccgattaccgcgatcacgccaaagtggtgggcggggataccgtcattagctttggtacggattcggtgacgctggtgggtgtgagcagtctgtcgggggaggggatagtcatcagctaa

SEQ ID NO: 186 - protein, 474 aa, Unknown
  Obtained from environmental sample
  DOMAIN (133)...(265): Lipase (class 3)
MGIFDYKNLGTEDSKALFADAMAITLYSYHNLDNGFAVGYQNNGLGLGLPATLVSALIGGSNAQGVIPGIPWNPDSEKAALDAVQKAGWTPISASTLGYSGKVDARGTFFGEKFGYGTAQAEVLGKYDDAGKLLELGISFRGTSGPRESVVTDSIGDVISDLLAAFGPKDYAKNYAGEAFGGLLKNVADYASAHGLSGNDVVVSGHSLGGLAVNSMADLSDSTWSGFYKDSNYVAYASPTQSAGDKVLNVGYENDPVFRALDGSSFNLSSLGVHDKPHESSTDNIVSFNDHYASSLWNVLPFSILNLPTWVSHLPTGYGDGMTRILDSGFYEQMTRDSTVIVANLSDPARATTWVQDLNRNAEAHKGNTFIIGSDGDDLIKGGRGADFIEGGKGNDTIRDSSGHNTFLFSGQFGNDRVIGYQATDKLVFNDVAGSTDYRDHAKVVGGDTVISFGTDSVTLVGVSSLSGEGIVIS

SEQ ID NO: 187 - DNA, 432 bp, Unknown
  Obtained from environmental sample
atgacagtacagcttgcgatgtataaaggtaaaggcggccccttcaatacgctggttcggtggtggacatcgagccagtacagccactgtgaactggtcatcgatggggtgtcctacagcagctcgctgatggatcgcggcgtcagggcaaaggtcatcgacttcaagcctgaacactgggacttcatcgagctgccctgggcggatgccgagaagattcgtgagtatttcatggtcactcagggtcagcggtacggaatcccaggtctcataaaatcgcaaatgctcaaccgcaacaaggagttcaagaactcacagttctgctctgagtggtgcgcccgtgcgttgggtattccatccggtggcatttacagcccggatacactgggcaagttgtgtggctgggtcagcggactgctgcacgcgacttaa

SEQ ID NO: 188 - protein, 143 aa, Unknown
  Obtained from environmental sample
MTVQLAMYKGKGGPFNTLVRWWTSSQYSHCELVIDGVSYSSSLMDRGVRAKVIDFKPEHWDFIELPWADAEKIREYFMVTQGQRYGIPGLIKSQMLNRNKEFKNSQFCSEWCARALGIPSGGIYSPDTLGKLCGWVSGLLHAT

SEQ ID NO: 189 - DNA, 774 bp, Unknown
  Obtained from environmental sample
gtgacctccacgcggagcatgctggcgggagtgccggtttacaccatcaccccgcaaaacctgcccactgcgaacgctgaccgcattctcctgcatttccacggcggcggctatgttctcggcccgggtgaggctggcacggatgaagccatcctgatggcgggcattgccgggtacaaggttatctccgtggactacaggatggcgccggatcatccgtacccggcggccatcgatgatgccgtcaccgtgtacaaagagctgctcaaattcgtaccggctcataaaatcggaattttcggcacttcaacaggcggcggcatgacccttattctggccctgcgcgccaaagcggaaggcttgtcgttaccaggcgctctggcggcgggcactccttggacggatttgaccaaaaccggcgacacttactacaccaacgagcacgtggacaacgttctggtcagctatgacggctgggtcggcgaagccgcgaaactctatgccgcggggcatgatttgaaagaccccatgctctccccagtatacggcgatgtttcgggctttccgccgatactgctcacctcgggcacgcgcgaccttttcctgagcaacaccgtgcgcatgcaccaaaaactccggcaagcgggagttgtggcggatctgatcgttttcgaaggtatgtcccactgccattattacttccttccagacgcgcccgaaacccgtttccactttacggaacttggcacatttttcggacgccatttacaatga

SEQ ID NO: 190 - protein, 257 aa, Unknown
  Obtained from environmental sample
MTSTRSMLAGVPVYTITPQNLPTANADRILLHFHGGGYVLGPGEAGTDEAILMAGIAGYKVISVDYRMAPDHPYPAAIDDAVTVYKELLKFVPAHKIGIFGTSTGGGMTLILALRAKAEGLSLPGALAAGTPWTDLTKTGDTYYTNEHVDNVLVSYDGWVGEAAKLYAAGHDLKDPMLSPVYGDVSGFPPILLTSGTRDLFLSNTVRMHQKLRQAGVVADLIVFEGMSHCHYYFLPDAPETRFHFTELGTFFGRHLQ

SEQ ID NO: 191 - DNA, 882 bp, Unknown; identical to SEQ ID NO: 47
  Obtained from environmental sample

SEQ ID NO: 192 - protein, 293 aa, Unknown; identical to SEQ ID NO: 48
  Obtained from environmental sample
  SIGNAL (1)...(35)
  DOMAIN (53)...(259): Lipase (class 2)

SEQ ID NO: 193 - DNA, 1848 bp, Unknown
  Obtained from environmental sample
atgggtgtctacgactacaaaaaccttactactgaggactccaaagcactgttcgccgatgccatggcgatcacgttgtactcctaccacaacctggataacggctttgccgtgggctaccagcagcatggcctggggcttggcttgccggtgaccctggtgcaggcgttgctgggcagcgccgactcccagggcgtgatccccggtatcccatggaaccccgactcggaaaaggccgccctcgacgcggtgcaaaaggccggttggacccccatcagtgccagcaccctcgactacggcggcaaggtcgatgcccggggcaccttctttggtgagaaaaccggctataccagtgcccaggtggaagtcctgggcaaatacgatgacgccggcaaactgctggaaatcggcatcgccttccgtggcacctcggggcccagggagaacctgattgttgattccatcggcgatgtgatcagcgacttgctggcagccttcggccctgcggactatgcgaaaaactacgcgggccaggcgtttggcgacttgctcggcaaagtcgccgcgtatgcccgcgcgcaggggctcagtggccaggatgtactggtcagcggccatagcctcggtggcctggcggtcaacagcatggccgacttgagcaacaccacctgggcgggtttctataaggacgccaactacgtggcctatgcctcgctgacccagagcagcggcgacaaggtgttgaacatcggttatgaaaacgacccggtctatcgcgccctcgacggttcgtcgttcaacctgtcgtccctcggggtgcatgaccaaccgcatgcctccagcgccgataacatcgtcagcttcaacgaccactacgcctcgacgctctggaacatcctgccgttttccatcctcaacctgccgacgtggatttcccatttacccacgggttatggcgatggcatgagccgcatcctcgaatccaagttctatgacctgaccagccgtgattcgacgatcatcgtcgccaatctgtcggacccggcgcgcgccaacacctgggtgcaggacctcaaccgcaatgccgaagcccaccagggcagtacgttcattatcggcagcgacggcaatgacctgatccagggtggccggggcaacgactacctggaaggtcgcgctggcaacgataccttccgtgatggcggcggctacaacatcctgctgggcggcaaggggttcaacaccctggacttgcagcagtcgctgaaaaacgtcgaagtggccaacgatggcgcaggcaccctgtacatccgcgacggccaaggcggtatcagcatgacccgcgatatgggcgcgatagtgagcaaggaaagctatctgttgctgttcagcaaggaggtgacccacagcgtgaccgacaaggggttgctggcgggcaaggacctgaccgcctacgcggcgtcgctcaagggcgatgccggcgccaatgttctcaaggccggcgatagcgggcagtggttgtttggcctggacggcaatgaccacctgatcggcggtaaaggcaacgatgttctggtgggcggggccggcaatgacctgctggaagcgggtggcgggcgcaataccttcctgttcgacggcgacttcggccaggaccggatcctgggttaccagtcgacggacaaattggtatttatgggcgtggcgggggtggacgggcagtacaactacctcgaccatgccaaggcagtgggcagcgatacgctgctgaccttcggcgataactcggtgacgctggtgggggtagggctgggcagcctgtcggcggaggcgttcgtgattacctga

SEQ ID NO: 194 - protein, 615 aa, Unknown
  Obtained from environmental sample
  DOMAIN (508)...(525): Hemolysin-type calcium-binding repeat (2 copies)
  DOMAIN (133)...(265): Lipase (class 3)
  DOMAIN (381)...(398): Hemolysin-type calcium-binding repeat (2 copies)
MGVYDYKNLTTEDSKALFADAMAITLYSYHNLDNGFAVGYQQHGLGLGLPVTLVQALLGSADSQGVIPGIPWNPDSEKAALDAVQKAGWTPISASTLDYGGKVDARGTFFGEKTGYTSAQVEVLGKYDDAGKLLEIGIAFRGTSGPRENLIVDSIGDVISDLLAAFGPADYAKNYAGQAFGDLLGKVAAYARAQGLSGQDVLVSGHSLGGLAVNSMADLSNTTWAGFYKDANYVAYASLTQSSGDKVLNIGYENDPVYRALDGSSFNLSSLGVHDQPHASSADNIVSFNDHYASTLWNILPFSILNLPTWISHLPTGYGDGMSRILESKFYDLTSRDSTIIVANLSDPARANTWVQDLNRNAEAHQGSTFIIGSDGNDLIQGGRGNDYLEGRAGNDTFRDGGGYNILLGGKGFNTLDLQQSLKNVEVANDGAGTLYIRDGQGGISMTRDMGAIVSKESYLLLFSKEVTHSVTDKGLLAGKDLTAYAASLKGDAGANVLKAGDSGQWLFGLDGNDHLIGGKGNDVLVGGAGNDLLEAGGGRNTFLFDGDFGQDRILGYQSTDKLVFMGVAGVDGQYNYLDHAKAVGSDTLLTFGDNSVTLVGVGLGSLSAEAFVIT

SEQ ID NO: 195 - DNA, 1071 bp, Unknown
  Obtained from environmental sample
atgacagcatttaatcaaaaaattcaaacattgctagaaaagggccaagggcctgctgctcgagctcttgataagttacctcgattagctcaagaatcacttgctaaaattcttggatattcttaccaatatcccgatctcgactcatttactaaatgtatgatggctgtacaaattaaacagggtcatatcggtttcattggttcagacccaattgaatctagaaggcagttcgatacgcaaatgctggctatacgccacaagtcaacagagatcgacttagtagaagatatccgtttacctctccaaagtggaaccgtttttgcgagacactatcacccagcaccgaataagaaattacctcttattgttttctatcatggaggaggatttgttgttggtggtttagatactcatgatgaggtttgtcgtatattggcaaaatatgcaaaagtacaagtcctcagtatcgattaccctctagcacctgaggtttctcctcagcatttaatccaatcttgtgaagatgctttagcttgggtatatcaaaatcgtagacagttaaaaatattaaaaggtcgaattgcggtagcgggggatagtgctggtggaaacattagtacagtcgtggctcaaagatcagtaaataaaccttatgctcctcaggcccaacttcttatttatcctgccgtcgatttcaagagtcgacatccttccttctatgcatataacgaaggattggttttaacggataacgatatcaataatgtcactcaatattatgcaacccagcataacgtagaactagatgatccaattatttctccaacttatggcaacttgaagaagaatcctccggcttttgtgattactgctgggcatgatgtattacatgatgaaggcaaaatttatagctataagctacgccaaaatggtgtcaaaatgcattatgaagaatattcagatcaaactcatggttttataaatttgacgcctatttccaaaaaagccaaacggtacaccattgagttcagtaaaaactttagaaaattttgggataaaaatagctaa

SEQ ID NO: 196 - protein, 356 aa, Unknown
  Obtained from environmental sample
MTAFNQKIQTLLEKGQGPAARALDKLPRLAQESLAKILGYSYQYPDLDSFTKCMMAVQIKQGHIGFIGSDPIESRRQFDTQMLAIRHKSTEIDLVEDIRLPLQSGTVFARHYHPAPNKKLPLIVFYHGGGFVVGGLDTHDEVCRILAKYAKVQVLSIDYPLAPEVSPQHLIQSCEDALAWVYQNRRQLKILKGRIAVAGDSAGGNISTVVAQRSVNKPYAPQAQLLIYPAVDFKSRHPSFYAYNEGLVLTDNDINNVTQYYATQHNVELDDPIISPTYGNLKKNPPAFVITAGHDVLHDEGKIYSYKLRQNGVKMHYEEYSDQTHGFINLTPISKKAKRYTIEFSKNFRKFWDKNS

SEQ ID NO: 197 - DNA, 1386 bp, Unknown
  Obtained from environmental sample
atgacagacgaactctggcgcaaatcagctcatgaactggcagccatgatcagtagtaagcaagtatccagtcgtgaggttgtgaccagtcacctcgagcgtatcgaggcgattaatccccgcgtcaatgcggttacggtgatcctggcggaatcagccctggcggcggcagacaaggcggacgccggtccaccgacgggcccgtttcatggcgtaccctttaccatcaaggaaaatattgattgcaccggttcggcgacaaccatgggtttgccggtctttgccgaaaccctgcccgtcgcggatgcaccagtggttgcgcgcatgaaagccgctggtgcgattccacttgccaggacgaatctaccggaaatgggtctgcggatcaccacggacaacccgctccggggccgaacgaacaatccctgggatatcactcgaactgcaggaggctcaagtgggggggagggggccaccctggcgacgggtatgagccccatcggtttgggtaacgatatcggtggctccctgagaaatcccgcttattgttgcggtattgcagctttgaaacccacaacgggcagaattccctttgtgccctcgataccggctgcgccccaacccaattcgttcaggctgatgtgcgtagagggtccaatggcaagatcggtcgctgacctggatatcgcctatcgtgtcctgtcgggttggcacccacaagacccttactcagtgcccgcggcactgcagggccctgtggtggccaggacagtagcgcttgtcacccggatgccggatttgacactccctgctgccacggtagcggcaattcaccaggccggggagcatctcagggcagcggggtggcaggtcgaggaggtcacgcctccggaactggctcgggtgaacgagatttgggctcgagtgctgggctccgacatccgcaataccttgcccttattggcacccatcatgagtgaaggcgccgtgggagcgttgacgcggtttctggatgaattcgatccggcagcgatgagcggcacgcaggtgtatgccgagcgagatcgcctcgcggtggcctggtcggcgttttttcaggaacactcgctggtaatcgggcccacctgggcagatttaccgtttctccatgacgcggacctcgatcccgaaaccggtattgagaccctccagcgccggctgcaattcattacccccggtaacttgctgggcctgcctgcggtcgcgttacccacgggtgtagtcgatggcttgccgaccggtgtgcagatctatgctgatcgctggcgggaagacttgtgcctggaggccgccgggactatcgaggcccgggtgggtcatatcaccccgattgacccgaagttctag

SEQ ID NO: 198 - protein, 461 aa, Unknown
  Obtained from environmental sample
  DOMAIN (26)...(441): Amidase
MTDELWRKSAHELAAMISSKQVSSREVVTSHLERIEAINPRVNAVTVILAESALAAADKADAGPPTGPFHGVPFTIKENIDCTGSATTMGLPVFAETLPVADAPVVARMKAAGAIPLARTNLPEMGLRITTDNPLRGRTNNPWDITRTAGGSSGGEGATLATGMSPIGLGNDIGGSLRNPAYCCGIAALKPTTGRIPFVPSIPAAPQPNSFRLMCVEGPMARSVADLDIAYRVLSGWHPQDPYSVPAALQGPVVARTVALVTRMPDLTLPAATVAAIHQAGEHLRAAGWQVEEVTPPELARVNEIWARVLGSDIRNTLPLLAPIMSEGAVGALTRFLDEFDPAAMSGTQVYAERDRLAVAWSAFFQEHSLVIGPTWADLPFLHDADLDPETGIETLQRRLQFITPGNLLGLPAVALPTGVVDGLPTGVQIYADRWREDLCLEAAGTIEARVGHITPIDPKF

SEQ ID NO: 199 - DNA, 1320 bp, Unknown
  Obtained from environmental sample
atgaaaatgaatttattgacaaaaacgattatcggtttatcggcggcaggcgcggcttatttatgggttaagaagcgaagtgaagccccgaatcgctttgagatcaaggggtttgtcagccatggctttgaggcggtcggcgaggcgttcgccgggaacttctccgagcgcggcgaactcggagcggcctgctgcatttatcaccgcggcgaaaaggtagttgacctttggggcggtgtgcggaacgagaaaacgggcgaaccctgggaagaggatacgatggtgatagtttattcggcaaccaagggcatggccgcgatggctctagccgttgctcattcccgtggttggctcgattacgatgcgcctgtctgcaaatactggccggagtttgcccggaacggaaaggaaaaaattaccgtccggcagcttcttgcccatcaagccgcgctttttgccttcgatgagccggttgatgcgagcgtggtcgccgatctcgaccgtctggcggaggtcatggcgcggcagaaacccgaatgggaaccgggaacgcggcaggcttatcacgccatcacgctcggattttacgaaagcgaactgctccgccggatcgatccgcagcaccggagtttgggacgattctttcaggacgagatagcttctccgctcgggctggatttttacatccgtctgcccgaatcaattcccgattcgagattggcaacgcttaaagctccgacctttttcgagaggatattcggtttccccattcagatgactctggccgctttcgatcaccggtccatcgtgtaccgggcgcttattgcgaatccgggagccgccatctgtcatgatgaccggcgcatctacgcccgcgagcttgaagttccgtcaggcggcggcgtcggaacggcacgggcgatagcttacgcctacagcgtttttgccaccggagggcgggaactgcagcttcgtaaagagactctcgatgagttgacggccccggcgattccggcggcgaacggtttttacgacgagttcatgaatggcgaagtagagttttcgctcggctttatgaagtccggcccgggtttgtctttcggtcgcccgggttccttcggcgcgcccggagcaggcggttcgatcggctttgccgatcccgcgtcagagatcggatacgcctacgtcaccaacggaatgagcgtgaaattaaccggcgatccgcgggaccttgcgctcagacaggcgttgtattcgtcaacgccggcgcagatcattcggaatagaattgatccgaatcgagggtcgaaaaatcattaa

SEQ ID NO: 200 - protein, 439 aa, Unknown
  Obtained from environmental sample
  DOMAIN (50)...(416): Beta-lactamase
MKMNLLTKTIIGLSAAGAAYLWVKKRSEAPNRFEIKGFVSHGFEAVGEAFAGNFSERGELGAACCIYHRGEKVVDLWGGVRNEKTGEPWEEDTMVIVYSATKGMAAMALAVAHSRGWLDYDAPVCKYWPEFARNGKEKITVRQLLAHQAALFAFDEPVDASVVADLDRLAEVMARQKPEWEPGTRQAYHAITLGFYESELLRRIDPQHRSLGRFFQDEIASPLGLDFYIRLPESIPDSRLATLKAPTFFERIFGFPIQMTLAAFDHRSIVYRALIANPGAAICHDDRRIYARELEVPSGGGVGTARAIAYAYSVFATGGRELQLRKETLDELTAPAIPAANGFYDEFMNGEVEFSLGFMKSGPGLSFGRPGSFGAPGAGGSIGFADPASEIGYAYVTNGMSVKLTGDPRDLALRQALYSSTPAQIIRNRIDPNRGSKNH

SEQ ID NO: 201 - DNA, 1032 bp, Unknown
  Obtained from environmental sample
atgcgcctgaacgtttttttgcgccccttggtctgtttgagtctgcttggccttgccgcctgcggcagcaatccccccagccccgcagcgacacccgagccgcccacagcaaccacatcagcccccccgatcaagatcggcctggcgctgggcggcggtgcggccaagggctttgcccatatcggcgtcatcaagatgctcgaggccaatggcctcacgccctcgttcgtggccggcaccagcgccggcagcgtggtgggcgcgctctatgcgagcggcatgagcgccttcgagctacaggaaaaagccgtggcgctggacgaagccaagatccgcgacctgcagctgtccgctggcggtctggtactgggccagaagctcgaagactatgtgaatgaacaagtccaccgcaagccgctggagcagatggccaagccctttgttgccatctccacgcgcctggaggacggcgaacgcacggtgttcgcacgtggcaacgtgggccaggcagtgcgcgcctccagcagcgtgcccggcgtgtttcagcccgtcaccatcggcaagtaccactatgtggacggcggcattgtcagccccgtgccggtggatgcagtacgcaatctgggggccgacatcgtgatcgccgtggatatctccaacaaggccagcggcaagaccccggccaatatgctgggagcgctcaatcagtcgattgccatcatgggccagaagctgggtcaggccgagctggcgcgagccgatatcatcattcgccccaaggtgctggacatcggcccggccgacttcgcgcagcgcagccatgcgattgtggaaggcgagaaggccgccactgcactgatgccgcagattcgcgaacgcatcgcgcagctgcgcgccgaacgcgccaaggccactcaggtagcgcagcaaaaggccgccgaagccagctatcaggactgcctgaagcagcgctccagccttcaaaagctgtccggcatggtgggcatgagcggcaactgcgaaaagccctga

SEQ ID NO: 202 - protein, 343 aa, Unknown
  Obtained from environmental sample
  SIGNAL (1)...(29)
  DOMAIN (48)...(206): Patatin-like phospholipase
MRLNVFLRPLVCLSLLGLAACGSNPPSPAATPEPPTATTSAPPIKIGLALGGGAAKGFAHIGVIKMLEANGLTPSFVAGTSAGSVVGALYASGMSAFELQEKAVALDEAKIRDLQLSAGGLVLGQKLEDYVNEQVHRKPLEQMAKPFVAISTRLEDGERTVFARGNVGQAVRASSSVPGVFQPVTIGKYHYVDGGIVSPVPVDAVRNLGADIVIAVDISNKASGKTPANMLGALNQSIAIMGQKLGQAELARADIIIRPKVLDIGPADFAQRSHAIVEGEKAATALMPQIRERIAQLRAERAKATQVAQQKAAEASYQDCLKQRSSLQKLSGMVGMSGNCEKP

SEQ ID NO: 203 - DNA, 1185 bp, Unknown
  Obtained from environmental sample
atggaaagcaaaaaaattgtaaataactatcctacggtctttgttcacggatatcttggtatgggatatgatgcagggcttacatcggtatatcggtattttggttcatttacaaaagatcttatgaaacatttaaaaggccaaggatatgaggtgtatcagccgactcttggagcatttagcccactttggaatcgttgttgtgatctttatgcctacatatttggtggtacggcagactatggaaaggtccatagtaggcgttatcaccaaaagagatatggtcgtacttatccaggtatacttaaagatttaggagaagaaggagaccataaaaaattaaatcttattggccactcttttggtggacctacggttacgctttttgctggcattcttgaacagggttgtaaggaagagttagaagctaccccagaagatgaagtatcagaatttttcaaaggtggaaaaggtgatcttcttcacacagtaactactctttctggtgttaacgctggcacttcagctgcggattttgcagaacattttcatctcatgggcctggtttccaagctatcagctggtctagtttcagctgtttcagaaactcaaattacaaagttccttgattttcatatggaggcttgggatcttatggaagagccttcaaaggtagatactcataaattcaaggttccagatatggctgcagtaaataggtatgcaaataataaagagggaaatatttattatgaaatgcatcctgaaataactagaaaacttttagccgattataaaccgaatccccatacatattattttgcgagaagagcttgtagaactcatgaaggtcctgggggacgtcagtatcctgacactaatatgaaccctttgttttttggaacggctcttattatgggtagatataagaatgaaagcataggtattgatgattcatggctttcaacagatggcattgtaaatgtaaaaggaatgggtgctccagatggacatccaagtattgagtggattcctggtatggagttcagaccaggtatatggcatgagatgccaatagaagataaggatcatcagtcttttgctggcatgtggtattttagaaatcgctattatctttattttgatgcgatgcttcacatgcttcatactttacctgatgcctaa

SEQ ID NO: 204 - protein, 394 aa, Unknown
  Obtained from environmental sample
MESKKIVNNYPTVFVHGYLGMGYDAGLTSVYRYFGSFTKDLMKHLKGQGYEVYQPTLGAFSPLWNRCCDLYAYIFGGTADYGKVHSRRYHQKRYGRTYPGILKDLGEEGDHKKLNLIGHSFGGPTVTLFAGILEQGCKEELEATPEDEVSEFFKGGKGDLLHTVTTLSGVNAGTSAADFAEHFHLMGLVSKLSAGLVSAVSETQITKFLDFHMEAWDLMEEPSKVDTHKFKVPDMAAVNRYANNKEGNIYYEMHPEITRKLLADYKPNPHTYYFARRACRTHEGPGGRQYPDTNMNPLFFGTALIMGRYKNESIGIDDSWLSTDGIVNVKGMGAPDGHPSIEWIPGMEFRPGIWHEMPIEDKDHQSFAGMWYFRNRYYLYFDAMLHMLHTLPDA

SEQ ID NO: 205 - DNA, 1278 bp, Unknown
  Obtained from environmental sample
atgtatgcatttttaaaaaagctatcaagcaagttattaataataccttttttggtggtgtttttagctactccagcatttgcaaaggaaagtaaacaatatagtagagcttcaattaacaataactatccaattatattagtgcatggatttatgggatgggggcgtgacgaagttttaggatttaagtattggggtggatttaatgatattcaagaagctttaagaaaaaagggatttaaggtgtatacagcttctgttggacctatttcaagtaattgggatagagcatgtgaactttatgcctatattaggggggggagagttgactatggagaagctcattcaagaaaaaatggacacctaagatatggtaagtattatccaggagtatatgaaaaatggggtataaaagataataaaggaaatattaaaaaggttcaccttttaggacatagtatgggtggtcaaactattcgtacattagtacaattactagaagagggctcacaagaagaaagaaatgttacgaaaaatgatactttatctccattgtttaaaggagacaaaagttgggtatttagtataactactatttcaactccacatgatggaagtagtcttggagataaaaataattattatatagacaaatatggtcaaaagatagtttgtgctttagcatcagtaacaggaaacgtaaaagattttgtatatgattttgatttagagcaatggggacttaagagaaaatcaaatgaaagtatacttagttactcaaatagagtatggagtagcaaaatatggaacacgaatgatgtatcaagatgggatctttcaccacagggtgcaagagaattaaataaatgggttaaagcacaacctgacgtgtattatttttcttggacaactaaggcaacaagaagtttaccaatgacaggaaaagttgttgcagatccaatatatatgaatccagtattgattcctacagcaacatttattgctcatcatacaaataatgaaggtggaattaatatagattctaagtggtttcataatgatggagctgtaagtgttataagtgctaatggtcctaagttaggctcaaatgataaaataacagagtatgattcaagaaaatctcctaaaaaaggagaatggacgcatatgggtataatcgataaaacagatcatatggatattgtaggaattggaaatattagagatttgacaggtttttattcaaatatagcaaaacaattaacatatttacaataa

SEQ ID NO: 206 - protein, 425 aa, Unknown
  Obtained from environmental sample
  SIGNAL (1)...(28)
MYAFLKKLSSKLLIIPFLVVFLATPAFAKESKQYSRASINNNYPIILVHGFMGWGRDEVLGFKYWGGFNDIQEALRKKGFKVYTASVGPISSNWDRACELYAYIRGGRVDYGEAHSRKNGHLRYGKYYPGVYEKWGIKDNKGNIKKVHLLGHSMGGQTIRTLVQLLEEGSQEERNVTKNDTLSPLFKGDKSWVFSITTISTPHDGSSLGDKNNYYIDKYGQKIVCALASVTGNVKDFVYDFDLEQWGLKRKSNESILSYSNRVWSSKIWNTNDVSRWDLSPQGARELNKWVKAQPDVYYFSWTTKATRSLPMTGKVVADPIYMNPVLIPTATFIAHHTNNEGGINIDSKWFHNDGAVSVISANGPKLGSNDKITEYDSRKSPKKGEWTHMGIIDKTDHMDIVGIGNIRDLTGFYSNIAKQLTYLQ

SEQ ID NO: 207 - DNA, 786 bp, Archaea
atggctgaaatatataaagccaatttcggaacccccgagcggggctgggtggttcttgtccacggcctcggaaagcacagcgggaggcacggaaggctgattaaagagctcaacgatgccggcttcgctgtctatgcctttgactggcccggtcacgggaagagccccggcaagagggggcacaccagcgttgaagaggctatggaaataattgattctataattgcagaaataggtgagaagcccttcatcttcgggcacagcctcggcggcctaaccgtaatacgctacgccgagacgaggcccgacaagatacgcggcctcgtggcctcctcgcccgccctcgccaagagcccggaaacgtctggcttcatggtggccctcgcaaagttccttggaaaaatagccccaggaatagtgctctccaacggcattaatccaaacctgctttccaggaatcccgaggcggttaaacgttacattgaagacccccttgtccacgacaggatttcggccaagctcggaaggagcatcttcgtgaacatggagctggcacacatggaagcagatagaataaaagcccctgtcctgctcctcgttggcactggcgacgtcataacgcccccggagggggcaagaaaactctttgaagagctcaaaatagaggacaagacgcttaaagagtttgagggggcctaccacgagatattcgaagacccagagtgggctgacgagttccacaggacgataatccagtggctggttgagggggcctcccggagctag

SEQ ID NO: 208 - protein, 261 aa, Archaea
  DOMAIN (42)...(252): alpha/beta hydrolase fold
MAEIYKANFGTPERGWVVLVHGLGKHSGRHGRLIKELNDAGFAVYAFDWPGHGKSPGKRGHTSVEEAMEIIDSIIAEIGEKPFIFGHSLGGLTVIRYAETRPDKIRGLVASSPALAKSPETSGFMVALAKFLGKIAPGIVLSNGINPNLLSRNPEAVKRYIEDPLVHDRISAKLGRSIFVNMELAHMEADRIKAPVLLLVGTGDVITPPEGARKLFEELKIEDKTLKEFEGAYHEIFEDPEWADEFHRTIIQWLVEGASRS

SEQ ID NO: 209 - DNA, 858 bp, Unknown
  Obtained from environmental sample
atgaaaaagtccgtactcatttttttatttttcatcgcctcggggagtatgagtgcggtctttttctatcacagtagtgatacagaagataaatcaatagaagtggcacaatcgcagcaagacacggaagtcgacaggcaatcaccaaaagcactgctggaatatttcatgtcaggtgtcggggaagtgaccttattggatattgaaaaacagatcagctcacaagatcatgaggtgaatggtattgcggtagataaagcgttatttgaccaatacgtgttatataaaaaagccatgatggctttagaaaataccgatgggccttcgctgtcattaacggcacttgaggggttacatcgtcaaattttagctcttcaagctgaatttttcactttcgagcagcagttattattgtttgaaaaagaaaaccaactgcgtcaattagcattggtaaagctacaattaacgcaaaatagttcgagtaatgatgacttcgaacatcaatggcagcaagaattgtctaatatgcctgcttatatacaagaaagttttgaaaacgcagaattactgacgaaattagctcaaacagaccaactttcggagcaagagaaacaattaaagcgtgaggcactggtgggagtggaagccagtgaacgcttagcgaccttagagcaacaacgagcacgttttcaattccaagttgatgagtatttctccatacgaagcaccattctagaagattcaacattatcggaggaaggaaagaaaaatgcgattctcctattacaagcggatcttttttctacagaacagctaaagcgcattgcggccttagaacgaatgcatgatagacaatga

SEQ ID NO: 210 - protein, 285 aa, Unknown
  Obtained from environmental sample
  SIGNAL (1)...(18)
  DOMAIN (17)...(284): Proteobacterial lipase chaperone protein
MKKSVLIFLFFIASGSMSAVFFYHSSDTEDKSIEVAQSQQDTEVDRQSPKALLEYFMSGVGEVTLLDIEKQISSQDHEVNGIAVDKALFDQYVLYKKAMMALENTDGPSLSLTALEGLHRQILALQAEFFTFEQQLLLFEKENQLRQLALVKLQLTQNSSSNDDFEHQWQQELSNMPAYIQESFENAELLTKLAQTDQLSEQEKQLKREALVGVEASERLATLEQQRARFQFQVDEYFSIRSTILEDSTLSEEGKKNAILLLQADLFSTEQLKRIAALERMHDRQ

SEQ ID NO: 211 - DNA, 1266 bp, Unknown
  Obtained from environmental sample
ttgcaaaacaaaataataaatacaaaaatcaaactaaggaaatttatgtctcaactaataaaaataacttacatttttataataattatattttgtatgcaacggacgtatgctaatcattgtgataattattttgaattaaaaacgcaaggcaatagaattgttgatcaatgtggagatacatttaaactaaaaagtgtaaattggtatggtgctcacgactatgcagaagttgttggaggtttagataagcaaccgatatcgacaattattagcttgataaaaagaggtggttttaattcggtacgattaaccttttcaaatcaaatgttgcatcgaactacatttgtagatacaaaatttatcagtgcaaatccagtattagctaacaagactccattgcaaatatttgattacgttgtaaatgaactaactaaggaagggattattgttattttaaataatcatacaacaacatcaacatggtgttgcggttacgatgttaatggaatttggaatcatccttatacgcaaactacatctcaatggataaatgattgggtcatgttagccgagcattttcgtaataatccgttggttgcgggaatggatttacgcaatgaggttcgtactactcgatattataattcttatattcccgtatttcctaattggggattgaatgatcataatgactggaagttagcttctacagaagttggaaatatgatccatgcggtgaatcctaaggtgcttattattgtagaagggttaaattgggtgggtgtaccaatgattaatggtcatcggcccatgcttaagccaattcgcgaaaatcctattcatttaaaaatttcgaataaattagtttatgaaatccataactatgcgtataccggacctacccatactggtgatgggaaggtttctcgatgggatatacgatatgaggatatggatgaagttactcttaataaaacgtgggatgaagaatttgggtttattttaaaaaatgataaagagtatacggcaccagtttggttaggcgaatttggtattggaataactgcaactgaaaaaggtaaggtatggtttcatcgaataatatcttatcttattaaacacgaaatgggatgggcatattgggcattaaatgcaactcgtgcaaatgggtctatagaatcttttggattactcaatgatgattggagtgactatcggcaagattggcgtacaaatgaaatgaagcgacttactaataattag

SEQ ID NO: 212 - protein, 421 aa, Unknown
  Obtained from environmental sample
  DOMAIN (52)...(392): Cellulase (glycosyl hydrolase family 5)
MQNKIINTKIKLRKFMSQLIKITYIFIIIIFCMQRTYANHCDNYFELKTQGNRIVDQCGDTFKLKSVNWYGAHDYAEVVGGLDKQPISTIISLIKRGGFNSVRLTFSNQMLHRTTFVDTKFISANPVLANKTPLQIFDYVVNELTKEGIIVILNNHTTTSTWCCGYDVNGIWNHPYTQTTSQWINDWVMLAEHFRNNPLVAGMDLRNEVRTTRYYNSYIPVFPNWGLNDHNDWKLASTEVGNMIHAVNPKVLIIVEGLNWVGVPMINGHRPMLKPIRENPIHLKISNKLVYEIHNYAYTGPTHTGDGKVSRWDIRYEDMDEVTLNKTWDEEFGFILKNDKEYTAPVWLGEFGIGITATEKGKVWFHRIISYLIKHEMGWAYWALNATRANGSIESFGLLNDDWSDYRQDWRTNEMKRLTNN

SEQ ID NO: 213 - DNA, 855 bp, Unknown; identical to SEQ ID NO: 127
  Obtained from environmental sample

SEQ ID NO: 214 - protein, 284 aa, Unknown
  Obtained from environmental sample
  DOMAIN (63)...(265): Lipase (class 2)
MALVVDDEDFAFRFDHGHHGIRRAGRPVPLRLRAASLILTLVLTAALLAGITTAPPAEATTGRNPVLLVHGLTADSLSWLVFKARLERDGFRVFTVDIPDRGFGDIARNSQYVAAKVDEIRRVTGAAKVDVIGHSEGGLLARHYIKYRGGADQVGRYISLGTPQYGTVLANFSTVFNLASLVGCVACYQMTTGSSFLANLNSGDDTPGPVKYTTIYTVYDELVQPYWNAALGNQPVTNVKIQSICPNRVVGHIGLVLDGTTYQIARAALRDQTPSWSNVNCWAL

SEQ ID NO: 215 - DNA, 783 bp, Unknown
  Obtained from environmental sample
atggaagaacagaaatttagaacaggttttattcttagcggaggtggtgcaagaggatttgcacatctgggatttatccaggctctgaatgaggctggtatctttccggatgtaatatctggaaccagcgccggagctcttatcggtgtatttattgctgacggttattctccgaaggaaatcctcagattattgcataccaacagccgcctcgattttatgagaccaacgatgccaagggaaggactgcttcagatttcgggaatccaaaaaatactaaaggcaagccttcatgctacaaagtttgaagaacttaaaattccgttgtatgttacagcgtccgatataaataacgggaaagtcgtctacttttctaaaggagacctcctcgatatagtcattgcctcaatgagcattcctgtactatttcaacctgttatgattgataatattcagtatgtggatggaggtgtgttcgataaccttcctgttcatccaatcgaaaataaatgtgagactcttatcggctctttcgtaaatcctgtcggccgtattgacaaattaagcggcctgataaatattgcagaacggactttcacactgaacatggcaaaggaagttaccgagaaatcagataaatttgacttgcttgtagctcctcccgctttgagaaattatggaatacttgatcctgataaagcagaagaacttttttccctgggatataatgcaacccgggagaaactcagggataatgaaatcaaaaaggcattaaaattgtaa

SEQ ID NO: 216 - protein, 260 aa, Unknown
  Obtained from environmental sample
  DOMAIN (10)...(168): Patatin-like phospholipase
MEEQKFRTGFILSGGGARGFAHLGFIQALNEAGIFPDVISGTSAGALIGVFIADGYSPKEILRLLHTNSRLDFMRPTMPREGLLQISGIQKILKASLHATKFEELKIPLYVTASDINNGKVVYFSKGDLLDIVIASMSIPVLFQPVMIDNIQYVDGGVFDNLPVHPIENKCETLIGSFVNPVGRIDKLSGLINIAERTFTLNMAKEVTEKSDKFDLLVAPPALRNYGILDPDKAEELFSLGYNATREKLRDNEIKKALKL

SEQ ID NO: 217 - DNA, 849 bp, Unknown; identical to SEQ ID NO: 75
  Obtained from environmental sample

SEQ ID NO: 218 - protein, 282 aa, Unknown; identical to SEQ ID NO: 76
  Obtained from environmental sample
  SIGNAL (1)...(23)

SEQ ID NO: 219 - DNA, 891 bp, Unknown
  Obtained from environmental sample
atggcaagtgaagcactgacgatgatcgtgaacttgttgcgcagccagcgcccgttgcaggaaccgacggtggaacaaatgcgtgcggggttggaggcgatggcgcaaatgtcgccgctacctgcggacgtggaattgaccaccgtggacgcaggaggtgtgcctggtgcctgggtgcgcgtgcccgagagcgaccccgaccgcgtcgtgctgtaccttcatggaggagggtacgtcattgggtcgattcggacacatcgcgaccttgctcagcgaattgcccgcgctgcccgttgccgtgtgttgttgatcgactaccggctcgcacccgaacacccgcatccggccgcggtggaagactcgacgcgagcgtaccgatggctcctcgagaccggaagcgcccccaaacgcatggccattgccggcgattcggccggcggcgggctgacggtggcgacactggtcgcactgcgagacgcgggagtgcccctgcccgctgccgccgtatgcttatcgccttgggtcgacttggagggaatcggcgagtcgatgaccacgaaggccgcagtcgatccgatggtccaacgagagccgttgctccgcatggcgtcgatgtacctggcgggtcaggacccgcgcacgcctctggcggctccgttgtacgccgacttgcgagagctgccgcccttgttgattcaggtgggtactgcggaaacccttctcgacgactcgatgcgcctggctgagcgcgcacgcgctgcgggcgtacaggtgacgctcgaaccttgggaagacatgattcacgtatggcaggcgttcgcggcaatgcttcccgagggccagcaggcgatcgagcggattggcgagtttttacgccagcattggcagtaa

SEQ ID NO: 220 - protein, 296 aa, Unknown
  Obtained from environmental sample
MASEALTMIVNLLRSQRPLQEPTVEQMRAGLEAMAQMSPLPADVELTTVDAGGVPGAWVRVPESDPDRVVLYLHGGGYVIGSIRTHRDLAQRIARAARCRVLLIDYRLAPEHPHPAAVEDSTRAYRWLLETGSAPKRMAIAGDSAGGGLTVATLVALRDAGVPLPAAAVCLSPWVDLEGIGESMTTKAAVDPMVQREPLLRMASMYLAGQDPRTPLAAPLYADLRELPPLLIQVGTAETLLDDSMRLAERARAAGVQVTLEPWEDMIHVWQAFAAMLPEGQQAIERIGEFLRQHWQ

SEQ ID NO: 221 - DNA, 1008 bp, Unknown
  Obtained from environmental sample
gtgtcgcaggatagggagtcgttgctgttgcggcaggccacggaggccggcatgacttcgtcccgggaactggccaacttcatggcgcaggccgggcatgaatcccgtggcttgagccgtctcaacgagagtttcaacttcacccggggcatctcgcagatcccggtggaagcagcgtggcgcaatggcaacggtgcgctggagagcgcccgtcaggacgcgctgcgtggccgcccggacaacctggctgagctgatgtacggcgggcgcatgggcaacgatgcccctggcgacgcactgaagtatcacggccgcggctatctgccgctggtcggcaaggagaactatgagcgtgccggcaaggcgctggaactggacctggtgaatcacccggaactggccgcgcagcccgagcacgcaggtcgcattgccgtgtggcagtggcagacgcgggtgccggaggcggcacgcgaggatgtgcgcgaagccacgcgtgccctgaatggcgcgctcaacggcatcgaagcccgccagcagcgttttgacgtgtggcaacagaagctgacccccgatgtgatggcgcgcctggagcgctgcgaagtgggggcgcctgcccagcaggcaacgggacgcgacatgtcgcaaccgggcgagccgggatacacgctgttctcgggagcgcgccagcacctgcagcagatggggccgcaaagcggtctgcgcagcgtgcaggaactggacaatgctgccggcgcactggcgctgagcgcgcagaaggcggggatgtcgcgcatcgatcatctactggccggcaacgacggccgcacgttgtttgccgtgcagggcgcgctgggtgacccagccatgctgcgcgcatcggtcgatcgcgaacaggcggcgcagcagccgctggcgcagagcagccagcagttggccgccagcgtcgcccagcaggaccccgcggccgcgctcgcccgcgagcaggagcagcgctctcgatccctgtag

SEQ ID NO: 222 - protein, 335 aa, Unknown
  Obtained from environmental sample
MSQDRESLLLRQATEAGMTSSRELANFMAQAGHESRGLSRLNESFNFTRGISQIPVEAAWRNGNGALESARQDALRGRPDNLAELMYGGRMGNDAPGDALKYHGRGYLPLVGKENYERAGKALELDLVNHPELAAQPEHAGRIAVWQWQTRVPEAAREDVREATRALNGALNGIEARQQRFDVWQQKLTPDVMARLERCEVGAPAQQATGRDMSQPGEPGYTLFSGARQHLQQMGPQSGLRSVQELDNAAGALALSAQKAGMSRIDHLLAGNDGRTLFAVQGALGDPAMLRASVDREQAAQQPLAQSSQQLAASVAQQDPAAALAREQEQRSRSL

SEQ ID NO: 223 - DNA, 1359 bp, Unknown
  Obtained from environmental sample
atgaagaaactggccgggcagctgtctgttgccctgttgtcgacagcaatgttggcgggttatgtgccgcaggcccaggcggcccagccggcggtgatttttgtgcacggcttcctcggcttttgcgaggatgaggcattgggttacaaatactggggcggtctggataatgtgccggcacagctggctgctgcctacccggacatgccggtatattcggtgtgcgtcggtccggtaagctcgaattacgaccgtgccgtcgagctgttctggaagatcaagggcggttgtatcgattacggcggcgcacacgccgcgacccatggccatgatcgctatttcaagaattcggcggcgccgcgtaataccgctgacacccgccagtgcccgagcccgaccgcggccgaagtgaagaacaaggccgtgtatccgacctgggatgaggcgcacccggtacatatcatcgcccatagccaaggcggacagaccgcgcggattctggcgcagctgctggccaacggtggccagagcccggaaggcgacaccggcctgtttggcggcaacgcggtgaacgcgcgctggatcaagagtattaccaccatctccacgcccaatgatggcaccaccttgtcggatgcaattaccgactatgtgccgttcgtacaatcgctggtcggcggcctggcaacctttgtcggcgccaatccgctgctgaccgattttgcctacgacttcaagctggatcagtgggatatccccaccaagagcggttcggaaagctattcggattacatgtaccgggtgctcaacaacaatccgaagaagatctttaccgacaagaatgtgcgcgatatcagtactttcgacctgtcgcccgatggcgcgatgcgcaccaacgactgggtagccgattcgccggacatctattacttctcgtggagcactcgtgccaataccaatggctggatcagcggctgggcttacccgcgctgggattccaacccgctgatcggcctgttctgcggccctggcttcatgggcaattttacccgcagcggcgcaccgtcgatcgactcctcgtggtgggacagcgattgcgtggtgccgaccaaggcgcagaaagccccgactcagcgcatttcgcgcaccgcaccgctgggcaccgcgcccacttcgcgtagcgtggtcatcaaggacatcagcgctggcggtacaccgcagaagggtgcctggaactggcgcggcctgatggacacctacgatcacctcgatatcgtcggctggacgcttggttggtcatcaaccgacaagctgaactggtacaaggcgcacatcaatcaactgcgcgcattgccataa

SEQ ID NO: 224 - protein, 452 aa, Unknown
  Obtained from environmental sample
  SIGNAL (1)...(27)
MKKLAGQLSVALLSTAMLAGYVPQAQAAQPAVIFVHGFLGFCEDEALGYKYWGGLDNVPAQLAAAYPDMPVYSVCVGPVSSNYDRAVELFWKIKGGCIDYGGAHAATHGHDRYFKNSAAPRNTADTRQCPSPTAAEVKNKAVYPTWDEAHPVHIIAHSQGGQTARILAQLLANGGQSPEGDTGLFGGNAVNARWIKSITTISTPNDGTTLSDAITDYVPFVQSLVGGLATFVGANPLLTDFAYDFKLDQWDIPTKSGSESYSDYMYRVLNNNPKKIFTDKNVRDISTFDLSPDGAMRTNDWVADSPDIYYFSWSTRANTNGWISGWAYPRWDSNPLIGLFCGPGFMGNFTRSGAPSIDSSWWDSDCVVPTKAQKAPTQRISRTAPLGTAPTSRSVVIKDISAGGTPQKGAWNWRGLMDTYDHLDIVGWTLGWSSTDKLNWYKAHINQLRALP

SEQ ID NO: 225 - DNA, 1209 bp, Unknown
  Obtained from environmental sample
atggaaatccatggtacatgcgacccaaagtttcacttggtgcggcaggagtttgaacgaaatttgcgtgagcgcggcgaagtaggagcgtccgtttgcgtcacgttgcacggcgaaaccgtagtggacttgtggggcggcatggcgcgtgccgacactcagacgccatggacggcggagacggtcagtattgttttttcctccaccaaaggcgcaacggcactctgcgcccatatgctggcgtcacgcggccaactggatcttgatgcaccagtcgccacctactggccggaatttgcccaagccggcaaagctcgcatcccggtgaaaatgctcttgaaccatcaagctggtctccctgccgtacggacaccgctgccccagggtgcctacgctgactgggaactgatggtcaatacgttggccaaggaagagccgttttgggaacctggcacccgcaacggctatcatgcgctcaccatggggtggctggtgggagaagtggtgcgacgtgtctctggtaagtcgcttgggacattcttccaagaggagatcgccaggccgttggggttagatttctggattggcttaccagcagagcaagaggcacgggtcgcgccgatgatcgcggcggagcctgatccgcaaagcctcttcttccaagaggtcgcgaagcctggggccttacagtcgctcgtactccttaactccggcggctatatgggtgctcagcctgagtatgactcgcgggcggcgcatgcggccgagattggtgcagccggtggtatcaccaacgcacgcggcctggcaggcatgtacgcaccactggcctgcggaggcaaactcaaaggggtggagttggtcagtcctgacatgctggcccgaatgtccagagtggcctctgcgactgggagagatgccgtgctcatgatgccaacccggtttgccctgggcttcatgaagtccatggacaaccgccgggagcctgctggcgtgcaggacagcgcgctctttggggaggaggcttttggccatgtgggggccgggggttcgtttggttttgccgatcccaaagcaggaatgtcctttggctataccatgaaccgaatggggctgggagccgggctcaacccgcgggggcaaagcctggtggatgcaacctaccgctcgttagggtatcagtcggatgcctctggagcctggacctga

SEQ ID NO: 226 - protein, 402 aa, Unknown
  Obtained from environmental sample
  DOMAIN (18)...(386): Beta-lactamase
MEIHGTCDPKFHLVRQEFERNLRERGEVGASVCVTLHGETVVDLWGGMARADTQTPWTAETVSIVFSSTKGATALCAHMLASRGQLDLDAPVATYWPEFAQAGKARIPVKMLLNHQAGLPAVRTPLPQGAYADWELMVNTLAKEEPFWEPGTRNGYHALTMGWLVGEVVRRVSGKSLGTFFQEEIARPLGLDFWIGLPAEQEARVAPMIAAEPDPQSLFFQEVAKPGALQSLVLLNSGGYMGAQPEYDSRAAHAAEIGAAGGITNARGLAGMYAPLACGGKLKGVELVSPDMLARMSRVASATGRDAVLMMPTRFALGFMKSMDNRREPAGVQDSALFGEEAFGHVGAGGSFGFADPKAGMSFGYTMNRMGLGAGLNPRGQSLVDATYRSLGYQSDASGAWT

SEQ ID NO: 227 - DNA, 1266 bp, Unknown
  Obtained from environmental sample
atgaacaagatgtttagcaaaaagggcgcttgcctggcggtagcggcggcgttgatgagcctaggcggggttgcgcaagcagccaacagttacccggtaattctggttaacggctatgccagctttgaccgtagcgaagccatgggtttcaaatactggggcggtaaaaacgatctgcaggcgcaactgcgcaatgcctacagcggcgcgcagccgatctacacggtcgcgccgggcggcttcagctccaactgggaccgcgccgtcgagctgtattatcagatcaagggcggctgcgtcgattatggcgctacccacgccactgcctttggccacacccgcgccggccgctgctataccggcgtctatccaagctggagcgccaccagcccggtgcatctggttggccacggcatgggtggccaaaccgtacgcatgctggcgcaactgctggcaagcaacggctcgccgaagaatgccggcctgttcggcaccgctggcgtcaccagtgcctgggtcaagagcgtcagcaccgtcgctacacctaacgatggcacgaccctgcccgacgtaatcaaggatcacgtgccgtatattcagggttacatcgcacgcctggcacgcgaagccggtgctcgcaacgatctggccgacatgactttcgacttccggctggatcagtggggcattgcccagcgcggtagtggcgagagtttcggcacctatttcgaccgcgtgttgcgcagcaattactggtacaacaccaccaacgatcgcgcgtcttacgacatgagcccgaaaggtgcggcagacctcaactcgtgggtgggcacggtatccggcgtgtattatttctcctacagcagccgtgcttcgaaacagggaactgccaacacctaccagtacccgcgcggcgatgccaacaacctggtcagcttcttctgcggcccaggctatatgggcaactacacacgtaaccagactggttatccggtgatcgacagcacctggtgggaatccgactgcatcgtgccgaccaaggcgcaaaaagcaccgactgtcatgatgtccggcagcagcttcatctccaccggagtcgtcatcaacgacatcagcgccggcggcacgccgcaactgggcaaatggaactggaaagggctgaaggatacttatgaccatctggatatggtcggctgggtccccaacccgaatttcgatgcactgaccttctacaaaacccacatcgaccaactgcgcagcctgtaa

SEQ ID NO: 228 - protein, 421 aa, Unknown
  Obtained from environmental sample
  SIGNAL (1)...(27)
MNKMFSKKGACLAVAAALMSLGGVAQAANSYPVILVNGYASFDRSEAMGFKYWGGKNDLQAQLRNAYSGAQPIYTVAPGGFSSNWDRAVELYYQIKGGCVDYGATHATAFGHTRAGRCYTGVYPSWSATSPVHLVGHGMGGQTVRMLAQLLASNGSPKNAGLFGTAGVTSAWVKSVSTVATPNDGTTLPDVIKDHVPYIQGYIARLAREAGARNDLADMTFDFRLDQWGIAQRGSGESFGTYFDRVLRSNYWYNTTNDRASYDMSPKGAADLNSWVGTVSGVYYFSYSSRASKQGTANTYQYPRGDANNLVSFFCGPGYMGNYTRNQTGYPVIDSTWWESDCIVPTKAQKAPTVMMSGSSFISTGVVINDISAGGTPQLGKWNWKGLKDTYDHLDMVGWVPNPNFDALTFYKTHIDQLRSL

SEQ ID NO: 229 - DNA, 1281 bp, Unknown
  Obtained from environmental sample
atgaacacgactcgtgccctcaggcatgcggctgccgcatgcgcgttcctctcgctgggctccgcggcgctgcccgcgctggccgccaattcctaccccgtgatcctcgtgcacggcttcgccggcttcggccgcaacgagctgctgggctacaagtactggggcggcctgaacgacctgcaggagcaattgaaggccaagtactcgaaccagctcgtggccaccgcggtggtcggcccgttcagctcgaactgggaccgcgccgtcgaactgttctaccagatcaagggcgggtgcgtggactacggcgcgctgcactcggcggccaacggccactacgagcgccccgagagctactaccacaacggccgcacctgctaccccgggctgtatccggcctgggacgccagccaccccgtgcacctgatctcgcacagcatgggcggccagacctcgcgcatgctggtgcagttgctcgcggccaacggcgcgccgagcaatccgtcgctgtttccctattcggtgaacgcgaactggatcaagagcgtgacgaccatcgccacgcccaacgacggcaccacgctggcctaccgcatcaccgactgggtgccggtcgtgcagcagctggtcaccggcatcgccgacttcacgggcgccaccggcggcaacctggtctacgacttcaagctggaccagtggggcgtgggcgcgcgggccgccggcgagagcttcagcgcctacgtcaaccgcgtgacgagcagcccgctgtggaattcgggcgtcaaggacctgtcgccgtacgacctgtcgcccgcgggggcgatggccgagaacgactgggtcaaggaccagcccaacgtcacgtacttctcgtgggtgaccaactccagctacacgggcctgctcaccggctggtcctacccgaacgccgacaccaacccgctgatcgccgcgttcgcgggccccggcttcatgggcaactactaccgcgactcgcgcccgatgccgcccgtcgacgacagcacctggttccccagcgacgccgtcgtcaactcggtggcgcagaaggcgccgacctgggcgatgaacgcgtcgggcaccgtctacaagcgcccggtggtggtcaaggacctcagcaacggcggcacgccgcaggccggcgcgtggaactacaagggcacgctgggcggcttcgaccacctggacgccgtcggctggacggtgttctgggacagcctgtcatggtacaaggcgcgcgtcgacgagttgcgggcgctctga

SEQ ID NO: 230 - protein, 426 aa, Unknown
  Obtained from environmental sample
  SIGNAL (1)...(28)
MNTTRALRHAAAACAFLSLGSAALPALAANSYPVILVHGFAGFGRNELLGYKYWGGLNDLQEQLKAKYSNQLVATAVVGPFSSNWDRAVELFYQIKGGCVDYGALHSAANGHYERPESYYHNGRTCYPGLYPAWDASHPVHLISHSMGGQTSRMLVQLLAANGAPSNPSLFPYSVNANWIKSVTTIATPNDGTTLAYRITDWVPVVQQLVTGIADFTGATGGNLVYDFKLDQWGVGARAAGESFSAYVNRVTSSPLWNSGVKDLSPYDLSPAGAMAENDWVKDQPNVTYFSWVTNSSYTGLLTGWSYPNADTNPLIAAFAGPGFMGNYYRDSRPMPPVDDSTWFPSDAVVNSVAQKAPTWAMNASGTVYKRPVVVKDLSNGGTPQAGAWNYKGTLGGFDHLDAVGWTVFWDSLSWYKARVDELRAL

SEQ ID NO: 231 - DNA, 279 bp, Unknown
  Obtained from environmental sample
atgagaacagaaatgctaagtactcgtatagaccatgataccaaagttgcttttactagcatctgtgacgaaatgggtcttagtacatcacaagctattaaaatatttgcaaaagccgtgattaatcatggtggtattccatttgacttacgtgtacctcaaccaaatgaaacaacgatgtctgcaatgaatgaactcgttcaagatcatgggcataaagcaaaatctgtcgacgctatgcttactgagctaactgaaggcaaagttaagaatgtatag

SEQ ID NO: 232 - protein, 92 aa, Unknown
  Obtained from environmental sample
  DOMAIN (3)...(84): RelB antitoxin
MRTEMLSTRIDHDTKVAFTSICDEMGLSTSQAIKIFAKAVINHGGIPFDLRVPQPNETTMSAMNELVQDHGHKAKSVDAMLTELTEGKVKNV

SEQ ID NO: 233 - DNA, 651 bp, Unknown
  Obtained from environmental sample
atgttaggaaggtttttacagaaaaaaggctacacatcacatgcaccaatttatcgtggacatggagtagaaccagagaaattaattgaaacaagaccagaagattggtgggaagatgttgttgaggcatacgaacacttacaagatttaggctatgaagaaattgctgttgcaggcttatctatgggcggcgtactcggactgaaactagcgacagaacgtaaagtgaaaggtgtcataccaatgtgtgcaccgatgtattttgataataaaacgcaattgacacaaggtttcgagatgtttgcaaaacaatacaagcaattagagaaaaaagatgcagcaacaattgagcaagaggtagctgcaatcatggattcatcccaggaattatttgtcgatattaaagcggccattgaagatgtcagtaaaattgttgattgtgtgtatacaaatacatttgtcgttcaagctacaaaggatcaaatgatcaatccagaaagtgctaattatatttatgaccatgttgcgacagacgagaaaaaaatcaaatggtatgatgaatctggtcatgtcattacgatgggcaaggaaaaagaccaactacatgaagatatttacatgtttttagaaaacttaaattgggaacaataa

SEQ ID NO: 234 - protein, 216 aa, Unknown
  Obtained from environmental sample
MLGRFLQKKGYTSHAPIYRGHGVEPEKLIETRPEDWWEDVVEAYEHLQDLGYEEIAVAGLSMGGVLGLKLATERKVKGVIPMCAPMYFDNKTQLTQGFEMFAKQYKQLEKKDAATIEQEVAAIMDSSQELFVDIKAAIEDVSKIVDCVYTNTFVVQATKDQMINPESANYIYDHVATDEKKIKWYDESGHVITMGKEKDQLHEDIYMFLENLNWEQ

SEQ ID NO: 235 - DNA, 1335 bp, Unknown
  Obtained from environmental sample
atggccaaccccatcgtcatcatccacggctggagcgacgacttcggctcgttccgcaagctgcgcgacttcctctccaccaacctcggcgttccggcgaagatcctcaagctcggcgactggatctcgctcgacgacgacgtcggctacgccgacatcgcgatggcgctggaacgcgcgtggaaggcggagaaactgccgaccgcgccgcgttcggtcgacgtcgtcgtgcacagcaccggcgcgctggtggtgcgcgaatggatgacgcgctaccacgcgcccgaaaccgtgccgatccagcgcttcctgcacctggcgccggccaacttcggctcgcacctcgcgcacaagggccgctcgttcatcggccgcgcggtgaagggctggaagaccggcttcgaaaccggcacccgcatcctgcgcgggctggaactcgcctcgccctactcgcgcgcgctggccgagcgcgacctgttcgtggcgccgtcgaagcgctggtacggcgccggccgcatcctcgccaccgtgctggtcggcaacagcggctactccggcatccaggccatcgccaacgaggacggctccgacggcaccgtgcgcatcggcaccgccaacctgcaggcggcgcttgcgaaggtggtgttcccgcccggcccggtcgcgccggtggtgcagttccgcaacatcgcgggcgccaccgcgttcgccatcgtcgacggcgacaaccattccgacatcaccatgaaggacaagccgtcgaagaccggcatccgcgaggaactgatcctcggcgcgctgaaggtgcgcgacgccgacttccccgagaacgccgacggcgcgttcccgtggcaggcgaagctcgacgcgaaggccggtgcggccaaggtgtcttcgcccgggcgccagaacaccgtggtgcacctcaccgacagcttcggcgacgacgtcgtcgatttcttcttcgagttctggcgcagcgaacgcagcgacaaggtgttcgagcagcgcttctacaaggacgtcatcgacgacgtgcacgtgtacgacggcaacggcgcgtggcgctcgctcaacctcgacctcgacaagttcgaggcgctgcgcaaggacccgaagctcggcttcgagaaactgctggtcagcgtgttcgcctcgcccgcgaagaagggcgacgccaaggtcggctacagcaccgccaccggccgcgacatcggcgcctggcacgtcgaaggccgtgacttcgccaaggccttcacgccgcaccgcaccctgttcgtcgacatcgagatcccacgcatcgtcgacgacgcggtgttccggttccgggaatag

SEQ ID NO: 236 - protein, 444 aa, Unknown
  Obtained from environmental sample
MANPIVIIHGWSDDFGSFRKLRDFLSTNLGVPAKILKLGDWISLDDDVGYADIAMALERAWKAEKLPTAPRSVDVVVHSTGALVVREWMTRYHAPETVPIQRFLHLAPANFGSHLAHKGRSFIGRAVKGWKTGFETGTRILRGLELASPYSRALAERDLFVAPSKRWYGAGRILATVLVGNSGYSGIQAIANEDGSDGTVRIGTANLQAALAKVVFPPGPVAPVVQFRNIAGATAFAIVDGDNHSDITMKDKPSKTGIREELILGALKVRDADFPENADGAFPWQAKLDAKAGAAKVSSPGRQNTVVHLTDSFGDDVVDFFFEFWRSERSDKVFEQRFYKDVIDDVHVYDGNGAWRSLNLDLDKFEALRKDPKLGFEKLLVSVFASPAKKGDAKVGYSTATGRDIGAWHVEGRDFAKAFTPHRTLFVDIEIPRIVDDAVFRFRE

SEQ ID NO: 237 - DNA, 1095 bp, Unknown
  Obtained from environmental sample
ttgaccttatactatgtggtggggattttgtcccatagtccttacttgtattttccgttttactctttacgctttactctttacgttttactctttacgtctcaggttctcagtcatcaacgatcacaactctctcactcaataaggaggatcattataccactcgacccaaaagccaaagcgtttttagaccaggccgctgcggctggcgcgccagcactggacgcgcttcccgttcgagaagctcgcgaggcgattcgcggcctgtttgcggccataggagaaaaagaacccgtcaaacaaatagaagatcgcatgatccctggcccgggcggacagatgcctgtgcgtatgtatacgccggcaggtaccacgccttttcccgtcctcgtttatttccatggcggaggatgggtcctgggtgatctagaaactcacgatgcgacctgccgggcgctggcaaatgctgctggctgcatggtgatctcggttgactatcgtttggcgccggagcacaaattccctaccgctcccgaggattgctatgcggccaccaaatgggcagcgctgaatgcggcggctcttggcggagatccaaccaagattgccgttggtggcgatagtgccggagggaatcttgctgccgcagtggcacaaatggccagtgaccgtggggctccttcgctcgggtttcagttgctcatctatccagtgaccaattacgcgttcgataccgcctcataccgggcaaatgcggagggctacctgctcacaaaaagcgcgatggggtggttctggaaccattatctgcagaacgaaaccgatggccagaatccctatgcttcgcctttacgtggacaatatctgcgcaatctacccccagcacttgtcatcaccgcggagtatgacccgctccgcgacgagggagaagcgtatgcagcgcggctgcgcgaagcaggtgttgctgtcactcacactgactacaaaggcatgattcatggcctcttcagcatgaccaacgtagtcgatcaggcgaagcaagccatcaatgaagctggtgccgcactgaaggcagcgtttgcggcgaaacgataa

SEQ ID NO: 238 - protein, 364 aa, Unknown
  Obtained from environmental sample
MTLYYVVGILSHSPYLYFPFYSLRFTLYVLLFTSQVLSHQRSQLSHSIRRIIIPLDPKAKAFLDQAAAAGAPALDALPVREAREAIRGLFAAIGEKEPVKQIEDRMIPGPGGQMPVRMYTPAGTTPFPVLVYFHGGGWVLGDLETHDATCRALANAAGCMVISVDYRLAPEHKFPTAPEDCYAATKWAALNAAALGGDPTKIAVGGDSAGGNLAAAVAQMASDRGAPSLGFQLLIYPVTNYAFDTASYRANAEGYLLTKSAMGWFWNHYLQNETDGQNPYASPLRGQYLRNLPPALVITAEYDPLRDEGEAYAARLREAGVAVTHTDYKGMIHGLFSMTNVVDQAKQAINEAGAALKAAFAAKR

SEQ ID NO: 239 - DNA, 615 bp, Unknown
  Obtained from environmental sample
atgaaaacagcgctcctgatttacatgacgattttcctggcggccgcccaacagcccgccgccggggactcccgcccggttatcgtcgcgttcggcgacagcctgacggccggctatggcctgccgcccggcgccggttatcccgaacaactgcagcagagactggacgcgcgcggacaccgctaccgtgtcgtcaacatggggatcagcggcgacacgaccagcggcggactcgcccgaatgaaagcggcgctggaactcaagcccgccatcgtcattcttgaactcggcgccaacgatggcctgcgcggcctccccgtcgatcagatgcgcgccaatctggaggagatgatcacggcctttcgcaagagcggcgcgaccgtcgtcctcgccggcatgaccctgccgcggaactatggagccgcttatattcggtcctttgaacaggtgtttaccgatctggcgaagaaatacaatttgcctcttatcccatttttcctggacggcgtcgccggagatccgaagtttaccctgcccgacttcatccatcccaacgccgaaggttatcgcatcgtgaccgaaacggtcatgaaaaccctcgagccgctcctgtag

SEQ ID NO: 240 - protein, 204 aa, Unknown
  Obtained from environmental sample
  DOMAIN (28)...(196): GDSL-like Lipase/Acylhydrolase
MKTALLIYMTIFLAAAQQPAAGDSRPVIVAFGDSLTAGYGLPPGAGYPEQLQQRLDARGHRYRVVNMGISGDTTSGGLARMKAALELKPAIVILELGANDGLRGLPVDQMRANLEEMITAFRKSGATVVLAGMTLPRNYGAAYIRSFEQVFTDLAKKYNLPLIPFFLDGVAGDPKFTLPDFIHPNAEGYRIVTETVMKTLEPLL

SEQ ID NO: 241 - DNA, 732 bp, Unknown
  Obtained from environmental sample
atgcttgacggctggtttgacgatcacgtagtggtcaaaaatatggccgcttctggccgaagcgcgaaaagttttattgaggaagggcggctcgagcgcattttgcgggagctcaaaaaaggcgattatttgttcatccaatttggccataacgatgaaaaggtgaacgacccggcgcgccacaccgagccgttcaccacctatcaggcatatttgaaacagtatattgacggcgcccgcgccaaaggggcgactcctgtcctcatcaccccggtcgaacggcggcggttttctgccgacggacgggcgctcgattcccacggacgctatcctgccgccatgaaagcgctcggaaaacacgaacgtgtcccagtgatcgatttgacaacgaaaagcaaacaacggtttgaacagcttggaccggaacggacgaagcggtggtttttatggcttgagccgggcgaacaccccaattatccgaaaggcatcaaagacaacacccattttcatcagcgcggggcgaaagaaatcgcccgtttggtcgtcgaaggcatcgtcgaactgaatctccctcttcgccgccacccacggactgttcggtttttggatcatttgcaagtcttcgtcactcaaatcgatgccgtatactttgatttccgtacgcccggcttgctcgatggcgcgcgtcgctcctttggcgaactcgtcccaagctgcgaagacggcgtcaat

SEQ ID NO: 242 - protein, 244 aa, Unknown
  Obtained from environmental sample
  DOMAIN (3)...(181): GDSL-like Lipase/Acylhydrolase
MLDGWFDDHVVVKNMAASGRSAKSFIEEGRLERILRELKKGDYLFIQFGHNDEKVNDPARHTEPFTTYQAYLKQYIDGARAKGATPVLITPVERRRFSADGRALDSHGRYPAAMKALGKHERVPVIDLTTKSKQRFEQLGPERTKRWFLWLEPGEHPNYPKGIKDNTHFHQRGAKEIARLVVEGIVELNLPLRRHPRTVRFLDHLQVFVTQIDAVYFDFRTPGLLDGARRSFGELVPSCEDGVN

SEQ ID NO: 243 - DNA, 1260 bp, Unknown
  Obtained from environmental sample
atgcagcgcgtcatcgcttcgctgacggccgccttttcatcggccgcggctcttgcatcgctcgcactactcgcattcgccaccactgccacaccggctcacgcggccaacaccgaccccatcatcctcgtgcacggctttgcaggtttcggccgcgacgaggcgctcggctacaaatactggggcggcttcgacgatctcgaggtgtatctcacgagccagggccgcacgaccagaaccgccgtcgtcggaccggtgagttccaactgggaccgcgcggtcgaactttactatcagatcaagggcgggtgtgtggactacggcagtgcccacgccgggcatttcggtcacgatcgcacggtgccgggcaagtgctttccgggcctgtatccgcagtgggacgcggcacatccggtgcatctcgtgtcgcacagcatgggcggccagacggccaagatgctcgtgcatctcctcgaggccaacggtgcgccgcatgaaaccggattgttcggcggcgccaaacgcgggtgggtcaaaagcgtgacggcgatctcgtcgccgctcaacggcaccacgcttgccaacgtagtgggcaacgacattcccttcgtgatcgacgtggtgggcggcatcgccgcgctgaccggcgtcagcgacaaggacaacttcgtctacaacttcaagctcgagcagtgggacctgaagcgctatcccggcgagcgttttaccgactatcagaaccgcatcgtggattcgccgatctgggagcatccggtggcccgcaaggatctgagcctgtgggtgctgtcgcccgacggcgcggccgaggaaaacgcgtgggtgcagacctggtccaacgtctactacttctcgtttgcgaccaacagcacattcaccggcctcttcaccggctgggaatatccgtcggccacgacgaatccgctcacgctgccgttcgtgtatcccgccgcgtggccgctgccgcccggcgtgggcaactacaccagcaatcgcgcgggacaggtggccatcgacaaaacctggtggcccaacgacgccgtcgtgaatacgaagagcatggttgcgccgtggaacggttcaagcatcgcggtgaactggaacggggccgcacagcgcggcaaatggaattacatggggctttccaccgggttcgaccacttcgacatcatcgggtggtcgctcttctgggatgcgcggtcgttctatcttacgcacgcaaatcgtttgcgcgcgctttag

SEQ ID NO: 244 - protein, 419 aa, Unknown
  Obtained from environmental sample
  SIGNAL (1)...(35)
MQRVIASLTAAFSSAAALASLALLAFATTATPAHAANTDPIILVHGFAGFGRDEALGYKYWGGFDDLEVYLTSQGRTTRTAVVGPVSSNWDRAVELYYQIKGGCVDYGSAHAGHFGHDRTVPGKCFPGLYPQWDAAHPVHLVSHSMGGQTAKMLVHLLEANGAPHETGLFGGAKRGWVKSVTAISSPLNGTTLANVVGNDIPFVIDVVGGIAALTGVSDKDNFVYNFKLEQWDLKRYPGERFTDYQNRIVDSPIWEHPVARKDLSLWVLSPDGAAEENAWVQTWSNVYYFSFATNSTFTGLFTGWEYPSATTNPLTLPFVYPAAWPLPPGVGNYTSNRAGQVAIDKTWWPNDAVVNTKSMVAPWNGSSIAVNWNGAAQRGKWNYMGLSTGFDHFDIIGWSLFWDARSFYLTHANRLRAL

SEQ ID NO: 245 - DNA, 1506 bp, Unknown
  Obtained from environmental sample
atgcaaaatccctccgcccctgtggttgaaacgcgccagggcgcactgactggtttcacagataacaatattcatgtgtggtgtgggatcccctacgcttcaccgcccgtgggcgactggcgctggcgctctccgcgtccgccggaaagctgggagggcgaacggcaggcaacgacgttttcgccctcaagctggcaaagcattgagtactgcaaagagctgggcggcggcgatcccggccagttctcggaagattgtctctatcttaacgtctggtctcccgtcgatcgcgccggaccgcttccggtcatggtctggctgcacggcggcgggttcacgattggcgcgggtagcctgccgccatacaacggtaaagcgctggcatcgcgcggtgtggtggttgtgacgatcaactaccgtctgggtcatctcggctttttcgcgcatccggcgctggaaggtgaagaaagccgcgtggtgcataactttgcgctacttgaccagatcgccgcgctggagtgggtgcgggataacattgccgcgtttggcggggatccgaacggcgtcacgctgtttggtgaatctgcgggcgcgcgcagcgtgttgtcgctgatggcatcgccgctggcggaaggattgttccataaagcgatcgtgcaaagcgggtacaccttgccggatacgccgcgcgagaaagccttacaaaaaggggaagccatagcctcccatttcgggctggagaatgccaccgccgagcagctgcgcgcgctgccgcctgaggccttctggccgctcacgtcaccgctgaacgttgcgcctgctcccgtcgtcggggattgcgtcttgccggaagcgatgctggatgtgttctttgccgcgcgtcagcatcccgttccgctaatgataggttcgaatagcgatgaagccagcgtgatggcggtgtttggcgtggatctggccgggcaaattcagaagcttcgccgggaacgacgctttggactggggctgattaagctgctctatccgggcgtgaagggggatgaagagctgggcagactggtgtgccgtgatatggcctttaccacgatgggctatgtggcgatgcaggctcagcagcgtgtcggcggactgtgctggcgctactggtttgattatgtcgcggaagcggaacatgccacctacatcaacggtgcctggcacggcaatgaagtgccttacgtattcgataccctgggccaggtggaaccttctcgtcagtacgtgaacgaacgcgatctgcagtttgctgcccaggtcgctgattactgggtgagcttcgcgcgtgatgccggggcgcaggacagcttatccggcccggtgcactggccagcctgtcgcaaaggacgcgacgtgctgttacgcattggtgtgaataaacatgcaggtttcaggcttgaaaaccgctttatgcgcgcccgcatgagtctcttcaaacgggtgatgaagcaccacgtcagcctcgattaa

SEQ ID NO: 246 - protein, 501 aa, Unknown
  Obtained from environmental sample
  DOMAIN (1)...(486): Carboxylesterase
MQNPSAPVVETRQGALTGFTDNNIHVWCGIPYASPPVGDWRWRSPRPPESWEGERQATTFSPSSWQSIEYCKELGGGDPGQFSEDCLYLNVWSPVDRAGPLPVMVWLHGGGFTIGAGSLPPYNGKALASRGVVVVTINYRLGHLGFFAHPALEGEESRVVHNFALLDQIAALEWVRDNIAAFGGDPNGVTLFGESAGARSVLSLMASPLAEGLFHKAIVQSGYTLPDTPREKALQKGEAIASHFGLENATAEQLRALPPEAFWPLTSPLNVAPAPVVGDCVLPEAMLDVFFAARQHPVPLMIGSNSDEASVMAVFGVDLAGQIQKLRRERRFGLGLIKLLYPGVKGDEELGRLVCRDMAFTTMGYVAMQAQQRVGGLCWRYWFDYVAEAEHATYINGAWHGNEVPYVFDTLGQVEPSRQYVNERDLQFAAQVADYWVSFARDAGAQDSLSGPVHWPACRKGRDVLLRIGVNKHAGFRLENRFMRARMSLFKRVMKHHVSLD

SEQ ID NO: 247 - DNA, 1695 bp, Unknown
  Obtained from environmental sample
atgagacgactggtgcttggaggagtggtcgggacgatcctcgccgttacgccgggcctgcgcgcggccttaccggacccggtgagcctcgatacagggcaggtgtccgggatcgcaacctcgacgcctgacgtgcgggccttcaagggcatccccttcgcggcgccgccggtgggtgagaaccggtggcgcgcgccgcagccggcgccgaagtgggagggcatccgcaaggccgatgcgttcgggtcgaactgtctggccggcgctcccggcggcggccgcggcggccgcggtggtcgtggcgccgccgccgctcccggcgcagcgccggcgcctcccgccgcacccggggtacctggcgcccgcggcgcggcggcccaggccccggcggcaccagccgccccgggggggcgcggcgccgcgcccggcggaggggcaccaccaccggcggccagcgaagactgtctccatgtcaacgtgtggacggcggcggagcgcaacaccgagcggcgtccggtcatgatgtggatttacggcggggggttcaccggcggctccagctcgcagggctggtacgacggcgaacagctcgcggccaagggcgccgtcgtcgtgacgttcaactatcgcctcggggccttcgggttcttcgcgcatcccgaactggcgaaggagtcggggcggaacgcgtcgggcaactacgggatgatggacgccatcgcggcgctccagtggattcagcgcaacatcacggccttcggcggcgacccgaccaacgtcaccgtgttcggcgagtcggccggcgccatcatgacggccgcgctcgtcggctcaccacaggcgaagggcctcttccatcgcgccatcctgcagagtggcggctggatggggttgcagatgaaccgcatgacgagcggtgagcaggcgcagggcaacggcgtcaaggccatgcaggcgctcgaggccccgtccgtcgccgagttgcgtgcgcggccgctggcggacctggcggggctcagcggcagcggtctcgtcatcgatggttacctcgtgccggaagacctgtcgatcaccttcgcgcaggggcggcagaacgaggtggacatcatcgccggctcgaacaaggacgaagcgacgttcttcggcggcggcacgcgcacggcgcaggtgcatcaggatcaggcgggccagcggttcggtgagctggcgccggagtacatgaagttctatccggcggcgagcgacacgcaggcagtcacgtcctacaacgacgcctacgcgcacgagaccaactggcacatgcggcttgccgcgcaggcgcaggcgcgcaaggggaaggacgcctacgtctactacttcacgcgcgttccgctcggcgccgacggccagccctcgccccgcggcgccacgcacacggccgagatccgctacgccttcaacacccgcgacggccaggtgtgggacgatgtcgatcgcaggctcgccgacacgatgtcgtcgtactgggtgaacttcgcgcgcacggggaacccgaacggacaggggttgccgaactggcccgcgttccgcgacatgcagagcggccgcgccatcgtgctcggcgacaccgtgcaggtggagtcgtcgccattcacgccgcagctcgggttcttcgatcgcgcgtatcagcggctgatgcggcagatccagggttga

SEQ ID NO: 248 - protein, 564 aa, Unknown
  Obtained from environmental sample
  SIGNAL (1)...(22)
  DOMAIN (12)...(551): Carboxylesterase
MRRLVLGGVVGTILAVTPGLRAALPDPVSLDTGQVSGIATSTPDVRAFKGIPFAAPPVGENRWRAPQPAPKWEGIRKADAFGSNCLAGAPGGGRGGRGGRGAAAAPGAAPAPPAAPGVPGARGAAAQAPAAPAAPGGRGAAPGGGAPPPAASEDCLHVNVWTAAERNTERRPVMMWIYGGGFTGGSSSQGWYDGEQLAAKGAVVVTFNYRLGAFGFFAHPELAKESGRNASGNYGMMDAIAALQWIQRNITAFGGDPTNVTVFGESAGAIMTAALVGSPQAKGLFHRAILQSGGWMGLQMNRMTSGEQAQGNGVKAMQALEAPSVAELRARPLADLAGLSGSGLVIDGYLVPEDLSITFAQGRQNEVDIIAGSNKDEATFFGGGTRTAQVHQDQAGQRFGELAPEYMKFYPAASDTQAVTSYNDAYAHETNWHMRLAAQAQARKGKDAYVYYFTRVPLGADGQPSPRGATHTAEIRYAFNTRDGQVWDDVDRRLADTMSSYWVNFARTGNPNGQGLPNWPAFRDMQSGRAIVLGDTVQVESSPFTPQLGFFDRAYQRLMRQIQG

SEQ ID NO: 249 - DNA, 705 bp, Unknown
  Obtained from environmental sample
atgagccagaccttacatttacaatttacccgactagccgacttggattgtttggcattacctcttcaggcggaccgcccaaccatcgtgatgttgcatggttatggcgctaattttgaggatcttgccggtctcgttccgatgcttgatccaaagggccaatggaactggatctttccgaatggcattttggaagtaccgatagaccaacatgtgatgggacgtgcctggtttccaatcgacatggaggccttgcaacggcatttgatggggggtgaagtacgcagcttcgcccatcatattcccgcagggctcgaaactgcccaaaagcggatcggtgaattgatttcggctttgggtatcaaagccgaagatttggtacttgcaggctttagtcagggcgcgatggtgacgtgccatacaatgatggctatgaaggaaaaccccagggcactgattcagctttcatccacattggtttccgaagaaacctgccgggaaaacatgccccggcaccaagatcttaaaatcttccaaagccacggccaattcgatccgttattgccgattgcggcagccagagaactcaagcaggtgtttgaagcctcatccagccatgtcgattaccacgagtttgccggggctcacgagattcctctgccgattatccaaaagcttgggagctttatgcaaagcgtgctctaa

SEQ ID NO: 250 - protein, 234 aa, Unknown
  Obtained from environmental sample
  DOMAIN (15)...(234): Phospholipase/Carboxylesterase
MSQTLHLQFTRLADLDCLALPLQADRPTIVMLHGYGANFEDLAGLVPMLDPKGQWNWIFPNGILEVPIDQHVMGRAWFPIDMEALQRHLMGGEVRSFAHHIPAGLETAQKRIGELISALGIKAEDLVLAGFSQGAMVTCHTMMAMKENPRALIQLSSTLVSEETCRENMPRHQDLKIFQSHGQFDPLLPIAAARELKQVFEASSSHVDYHEFAGAHEIPLPIIQKLGSFMQSVL

SEQ ID NO: 251 - DNA, 1215 bp, Unknown
  Obtained from environmental sample
atgaagtacattgtcattctaaagaaaggttacaatagagattcacttacagactactgcacaaaagtaggtaagccatgtgagctacacaatctcgttatcattaacactgacgaagctacagcaaaaattgttgctgatttagattgtgtagaatctattgagaaagattctgtatgtacatctgatgaggaattttacaagtcatctcgtactactgataattgggcattgacacgattcaattttacagaacctcaacgagagtatcctgagagttaccgttacaatcgcacaggaaaaggtgtgggcatctacgttattgacagtggtgtccgtactactcatcaagagttagtaggacgtgtagagactgtctacagtgttctcgaaggtaagcaatttgacagtgataatgagctaaacattaaccgtagccatggcacagcagtggcgtcagcagcagcagggaagaagctaggtattgcaagtgaagctactgtctacaacttattcgtagatttttctatgtcagacattatcaaagcgtttgatactgtattgcaccattacaaaaagtctaagagtgctgctgtacttgtgacatcattctcaactttgtcactagcaatgaaacctatctcagacgcactctaccaagcaggtctcgttcatgtatctagtgcaggcaatcagtctacagatactccaagataccctgctgcattccctcagactatctctgtaggtgctactgacaagcaggacaataaagcatcattcagtaactttggcaataccgtagacgtatatgcacccggagtgaatgtgaaggtagcggatcatgcaagagatgttcgtactcgtattgcaagagggacttctttctctgcaccttatgttgctggtatcattgcactcatgctagaagattcagacaagcctcgtaagcgcgagcatgtcgataccatacgacaatccttcctagacaatgctacaagtatttccaaggcagataagcgtgtgccacatacacgttttgacattgaaccgttcaagtttcctaaaccttctcctgtagaaaaaattgtacaaaaggtgtctgacaataaggatacgtcaagtatttcagacaaaaaacgtaaaaagagttacacgaaacagattgtagcaggcgttatcctagcagctactatagttgcaattcttgtgtaa

SEQ ID NO: 252 - protein, 404 aa, Unknown
  Obtained from environmental sample
  DOMAIN (85)...(345): Subtilase family
MKYIVILKKGYNRDSLTDYCTKVGKPCELHNLVIINTDEATAKIVADLDCVESIEKDSVCTSDEEFYKSSRTTDNWALTRFNFTEPQREYPESYRYNRTGKGVGIYVIDSGVRTTHQELVGRVETVYSVLEGKQFDSDNELNINRSHGTAVASAAAGKKLGIASEATVYNLFVDFSMSDIIKAFDTVLHHYKKSKSAAVLVTSFSTLSLAMKPISDALYQAGLVHVSSAGNQSTDTPRYPAAFPQTISVGATDKQDNKASFSNFGNTVDVYAPGVNVKVADHARDVRTRIARGTSFSAPYVAGIIALMLEDSDKPRKREHVDTIRQSFLDNATSISKADKRVPHTRFDIEPFKFPKPSPVEKIVQKVSDNKDTSSISDKKRKKSYTKQIVAGVILAATIVAILV

SEQ ID NO: 253 - DNA, 927 bp, Unknown
  Obtained from environmental sample
atgccgagcccaaaaagtaatattgatgttatcagcatcgatggtggtggaatacgtggagtattctccgttacattattggatagattatgtaagacctatcccaatcttcttaagaaaacatatctgtttgctggaacatctacaggtgggatcattgccttaggattagcaaacaacatgacacctcttgagataagagccttgtacgagaagaacggttcaaagatatttcataaatctgtgtgggaaggcgttaaagatttaggtggaaccataggtgcaaagtatagtaacaagaatcttaaatccgttttgaaaaaatactttggttcattgaagttaaaagatttatctaaaaaagtactaatacctacttttgatttacactcagacaaagaagaaggctatccaatgtggaagcctaagttctatcacaactttgatggagaaacggaagatatagaaaagctcgttcttgatgtagctatgatgacatcagcagcgcccactttcttccctacatacaacgggcatattgatggcggtgttgtagccaacaatccatcgatggccgcattagcccagattatggatgaaagatatggcatcaatgcctctgaagttcatattcttaatataggaacaggttttaaccctgcttatgttaagatgaatccaggggaagagaaagactggggtgaacttcagtggataaaacctttaatcaatcttctagtcgatggctctatggatgtttctacttattattgtaagcaagtcttacgtgataatttttatagggttaacatgaaattacctaagaacgtagaaatggatgatcctaattctattccttatttaattgaacttgcaaactcagttgatctaactgaatgtatcaactggcttaattcgaggtggtaa

SEQ ID NO: 254 - protein, 308 aa, Unknown
  Obtained from environmental sample
  DOMAIN (11)...(194): Patatin-like phospholipase
MPSPKSNIDVISIDGGGIRGVFSVTLLDRLCKTYPNLLKKTYLFAGTSTGGIIALGLANNMTPLEIRALYEKNGSKIFHKSVWEGVKDLGGTIGAKYSNKNLKSVLKKYFGSLKLKDLSKKVLIPTFDLHSDKEEGYPMWKPKFYHNFDGETEDIEKLVLDVAMMTSAAPTFFPTYNGHIDGGVVANNPSMAALAQIMDERYGINASEVHILNIGTGFNPAYVKMNPGEEKDWGELQWIKPLINLLVDGSMDVSTYYCKQVLRDNFYRVNMKLPKNVEMDDPNSIPYLIELANSVDLTECINWLNSRW

SEQ ID NO: 255 - DNA, 933 bp, Unknown
  Obtained from environmental sample
atgaagaattgggcgattgccggagccgcggttgccgcgggattgcttggcggcgggctgttcacgcgccgggcgacagcgcgggccgaggcgatggtgccaatggacggccgtctgatcgaggccgggccctaccggatccacgtcgcggaacagggaaacgggcggcccttgctcctgatccacgggctcagcgcgcagctgcgaagctttgcgcaggtgatggtggacgagcttgccaaggaccaccgcgtcatccgcatcgatcggccgggttcgggctactccccgcccctaccctcgggctcgcagcaccttgccgaccaggccgatgcaatcgctgcgctgatcgacgcactcgaactcgaccgtccgatactggtcggccattcacttggcggagcgctgtcgctccacatcgcgcagcggtatccggacaaggtgggcgggctggcgctgatcgccccggcgacccagccggtgaccgatgttcccccggtattccgtgggctgatgatcccgcccgctttgatcccgctcgtcgcgcgaacgatcgcggtgccaatgggtgtcgcgacccgcgaccgggtgcttgccgaagtgttcaagcccgagcccgttcccgccgactaccttatcgccggcggcggcgcgcttgcgcttcgtgcgggcaatgtcgaagcggccgccggcgatctccggctggcgcggaccgatgccgaggagatggtcggccgctacggcgacctgaaggtgccgaccgccatcctctacggccgctcggacaatctgctcgactatcgcattcacggcgaaaagaccgcggcggagatccccggcgcgcgcctgaccctggtcgaaggcggccacatgctgcccttcacccagccactcgaaaccgccttgtgggtacgcagcgtccttcccgcttag

SEQ ID NO: 256 - protein, 310 aa, Unknown
  Obtained from environmental sample
  SIGNAL (1)...(27)
  DOMAIN (83)...(306): alpha/beta hydrolase fold
MKNWAIAGAAVAAGLLGGGLFTRRATARAEAMVPMDGRLIEAGPYRIHVAEQGNGRPLLLIHGLSAQLRSFAQVMVDELAKDHRVIRIDRPGSGYSPPLPSGSQHLADQADAIAALIDALELDRPILVGHSLGGALSLHIAQRYPDKVGGLALIAPATQPVTDVPPVFRGLMIPPALIPLVARTIAVPMGVATRDRVLAEVFKPEPVPADYLIAGGGALALRAGNVEAAAGDLRLARTDAEEMVGRYGDLKVPTAILYGRSDNLLDYRIHGEKTAAEIPGARLTLVEGGHMLPFTQPLETALWVRSVLPA

SEQ ID NO: 257 - DNA, 1152 bp, Unknown
  Obtained from environmental sample
atgagttgggtcatcggtctgatcatcgtcctcgtgctgctctgggccattgcccgattccatctcgcgggcgagaacctttcgcggttcgatggcgcgacggacgcgattcgagtcgcttcgtccagggagccgagcccggagcatcaccaggccgtcgagaccatccgggccatgcagcgcgaggccagcggcgggctgagcccgcgagaacgcctgcgggtgatgcgcacgcgcttcgacgccctcggtgaaggcgacttcggcgccaccttctcagccgtcgaggccgggggtgtgccggcggagtgggttctcgcggcgggcgcggatcctgaccgccgtctgctctatcttcacggtggcgcctacatgctcggcagcccgaagagccaccgcgccatcacgtcgaagttctccaggatcgccggcgccgcggtgttggccgtcgactatcgcctgatgcccgagcatcgccgcatcgccggcatcgaggactgccgcagcgcctatgagtggatcctcgagcacgggccggatgggcccgcaccggtgcaggccctgttcgtggccggcgattccgccggcggtaacctcgctctcgccacaatcgcctgggcgcgcgatgccggactgcgcgcggccgacgccgtggtggtgctgtcgccccacactgatggctgcatggccagtccgagcctgaagagcaacatgaagaccgatcacatgctcggtccgatgttcgcccgcatggcccatgtgccgcgctctctgagcctctggatggcgtggctgaccggccggatgccaccggctgatccacgggtctcgccgctgcgcggtgagcttcgagacctgccgccgacgctggtccacgcgagcgaagcggagatgctcctcgacgacgcgcggcgctacgtcaacaaggcccgggccgcgggcaccgacgcccgcctgcatacctggccgcatcagctgcacgtctggcacatcttcgagcagacgttgcctgaagcccgcgaggcgtttgccgacatcgaggcattcctggcggagtgggcgccacaggatgtcgagagtgcggacctgccgagcagggtctcggcgagtgcggcacacccggaaccccggcgcgctcgcagcgtcgaatag

SEQ ID NO: 258 - protein, 383 aa, Unknown
  Obtained from environmental sample
MSWVIGLIIVLVLLWAIARFHLAGENLSRFDGATDAIRVASSREPSPEHHQAVETIRAMQREASGGLSPRERLRVMRTRFDALGEGDFGATFSAVEAGGVPAEWVLAAGADPDRRLLYLHGGAYMLGSPKSHRAITSKFSRIAGAAVLAVDYRLMPEHRRIAGIEDCRSAYEWILEHGPDGPAPVQALFVAGDSAGGNLALATIAWARDAGLRAADAVVVLSPHTDGCMASPSLKSNMKTDHMLGPMFARMAHVPRSLSLWMAWLTGRMPPADPRVSPLRGELRDLPPTLVHASEAEMLLDDARRYVNKARAAGTDARLHTWPHQLHVWHIFEQTLPEAREAFADIEAFLAEWAPQDVESADLPSRVSASAAHPEPRRARSVE

SEQ ID NO: 259 - DNA, 930 bp, Unknown
  Obtained from environmental sample
atgaggaattgggcaatcggcgggctggcgctgggcgcgggtgcgctgggagcgggcctgtacaccagccgcaaggcacgggaggccgaggccgcggtgccgatggacgggcgcatggtagaggccggcgggcaccgcttccatgtcgcggagcaggggcagggccggccgctgctgctgatccatgggctcgccgggcagatgcgcaacttcgggcagccgatgctcgacgacctggcgcgcgactatcgggtcatccggatcgaccggccggggtccggctactcgccgcggctggcgagcgggcgcgggcatctgtcgggacaggccgacgccatcgccgcgctgatcgacgcgcttggcctggagaaaccggtgctggtggggcattcgctgggtggtgcggtgagcctcgcgacggccatgcgccatcccgacaaggtcggcgcgctggcactgatcgctccggcgacccagccgatccagagcattcccgaggtgttcaagggactggtcgtcccgcccgctttgctgcccctggtcgcctggaccatcgccgttcccgtgggcgtcgcgaccaaggacaaggtgctgcagcaggtgttcgcgcccgagccggtgccggcgaactttctggtggatggcggcggcatgctcgggttccggcccaagaacttcgagggcgcggcaaccgacctcgccgacgccagcagcgaggccgagaccctgctgccgggctacgccgggctgaagctgccggtcggcatcttctacgggcgcggggacaatctgctcgactatcgactgcatggcgagaagaccgcatccgagatcccgggcgcccggctgacgctgaccgagggcggccacatgctgcccttcacccaaccggaggcgaccgcccgcttcgtccggagcgtgatcgagtaa

SEQ ID NO: 260 - protein, 309 aa, Unknown
  Obtained from environmental sample
  DOMAIN (83)...(306): alpha/beta hydrolase fold
MRNWAIGGLALGAGALGAGLYTSRKAREAEAAVPMDGRMVEAGGHRFHVAEQGQGRPLLLIHGLAGQMRNFGQPMLDDLARDYRVIRIDRPGSGYSPRLASGRGHLSGQADAIAALIDALGLEKPVLVGHSLGGAVSLATAMRHPDKVGALALIAPATQPIQSIPEVFKGLVVPPALLPLVAWTIAVPVGVATKDKVLQQVFAPEPVPANFLVDGGGMLGFRPKNFEGAATDLADASSEAETLLPGYAGLKLPVGIFYGRGDNLLDYRLHGEKTASEIPGARLTLTEGGHMLPFTQPEATARFVRSVIE

SEQ ID NO: 261 - DNA, 1854 bp, Unknown
  Obtained from environmental sample
atgggtgtgtatgactacaagaacttcagcacagcggattccaaggccttattcagcgatgccatggccatcacgctgtactcctatcacaacctcgacaacggtttcgcggtcggctatcagcacaacggtttcggcctcggtctgccggctacgttgatcagtgcgctgatcggcggcaccgattctcaaggggtgattcccggactgccgtggaatcccgactcggaaaaactcgccctcgatgccgtgaagaaggccggatggacaccgatcaccgcctcgcaactcggctatgacggcaagaccgacgtgcgcggaaccttcttcggcgaaaagcccggctacaccagcgcccaggtggaaatcctcggcaagtacgacgcccagggccatctcacggaaatcggcatcgcctttcgcggcaccagcggcccacgggaaatcctcatcggcgactccatcgccgacgccatcaatgacctgctcgccgcgttcgggcccaaggattacgccaagaactacgtcggcgaagccttcggcaacctgatgaacaacgtggtggccttcgccaaggccaacggcctcaccggcaaggacgtgctggtcagcggccacagcctcggcggcctggcggtcaacagcatggcggacctgagcggcagcaaatggggcgggttctttcaggactccaactacatcgcctatgcctcgccgacccagagcagcaccgacaaggtgctcaacgtcggctacgagaacgacccggtgttccgcgccctcgacggctcgaccttcaccggggcatcgctgggtgtccacgacgcatcgaaagtctcggcgaccgacaacatcgtcagcttcaacgaccactacgcctcgaatgcgtggaacgtgctgccgtattcgatcgtcaacattccgacctggatctcgcacctgccgacggcttacggcgacggcatgaaccgggtcatcgagtcgaagttctacgacctcaccagccgtgactcgacgatcatcgtcgccaatctgtcggacccggcgcgggccaacacctgggtgcaggacctcaaccgcaacgccgagccccacaagggcagcaccttcatcatcggcagcgacggcaacgatctgatccagggtggcagcggcaacgattatctggaaggccgtgccggcaacgacaccttccgcgacagcggcggctacaacatcatcctcggcggttcaggcaacaacaccctcgagttgcagcagtcggtgaacaagttcgacttcgccaacgacggcgccggcaacctgtacatccgcgatgccaacggtggaatcagcatcacccgcgacatcggcagcatcgtcaccaaggagccgggtttcctctggggcctgttcaaggacgacgtgacccacagcgtcaaagccgatggcctgaaggtcggcaataacgtcacccagtacgaatcgagcgtgaagggcactagtggcgccgacaccctcaaggcccacgccggcggtgactggctgttcggcctggacggcaacgatcacctgatcggtggcgcgggcaacgacgtgttcgtcggcggcgccggcaatgacctgatggagtcgggcggcggggcggatacgttcctgttcagcggcgcattcggccaggaccgggtggtgggcttcaacggcaacgacaaactggtgttcctcggcgtgcagggcgtgttgcccggcgatgacttccgcgcccatgcctcgtcggtggggcaggatacggtgctcaagtttggcgctgattcggtgacgctggtcggggtttcgctgaacagtctcagcgccgatggcatcgtgatcgcctga

SEQ ID NO: 262 - protein, 617 aa, Unknown
  Obtained from environmental sample
  DOMAIN (133)...(265): Lipase (class 3)
  DOMAIN (381)...(398): Hemolysin-type calcium-binding repeat (2 copies)
  DOMAIN (510)...(527): Hemolysin-type calcium-binding repeat (2 copies)
MGVYDYKNFSTADSKALFSDAMAITLYSYHNLDNGFAVGYQHNGFGLGLPATLISALIGGTDSQGVIPGLPWNPDSEKLALDAVKKAGWTPITASQLGYDGKTDVRGTFFGEKPGYTSAQVEILGKYDAQGHLTEIGIAFRGTSGPREILIGDSIADAINDLLAAFGPKDYAKNYVGEAFGNLMNNVVAFAKANGLTGKDVLVSGHSLGGLAVNSMADLSGSKWGGFFQDSNYIAYASPTQSSTDKVLNVGYENDPVFRALDGSTFTGASLGVHDASKVSATDNIVSFNDHYASNAWNVLPYSIVNIPTWISHLPTAYGDGMNRVIESKFYDLTSRDSTIIVANLSDPARANTWVQDLNRNAEPHKGSTFIIGSDGNDLIQGGSGNDYLEGRAGNDTFRDSGGYNIILGGSGNNTLELQQSVNKFDFANDGAGNLYIRDANGGISITRDIGSIVTKEPGFLWGLFKDDVTHSVKADGLKVGNNVTQYESSVKGTSGADTLKAHAGGDWLFGLDGNDHLIGGAGNDVFVGGAGNDLMESGGGADTFLFSGAFGQDRVVGFNGNDKLVFLGVQGVLPGDDFRAHASSVGQDTVLKFGADSVTLVGVSLNSLSADGIVIA

SEQ ID NO: 263 - DNA, 1092 bp, Unknown
  Obtained from environmental sample
ttgatcctccccacccacctcgccttcgcttccgtcctgtacctgggcggggcggcgctgttcggctaccggcccgacgcggtcggctgggcgctggcgaccgtcgcctgcctgctgccggacgtggatttaccgaccgccaagatcgggcggctgtgctggttcgtggccgtgcccctggagcggcgcttcggacatcggaccgtgactcattccgccgtgggcctgctggccgtggccgggttggccctgccgctgtggtggatcgagccgctgtacttctgggcggtggtcggggggtactggtcgcacctgtggctggacatgctcaacctgcgcggggtggatctgttctggcccagtcccattcgggtggtgacgccgggcaatcgccagtggcggttccaggtgggcggcaagggggaaatgatcctcttggccgggctgctggtggttacggtggcgctgtatccgttgagccacctggggttccgggacgggttgcaggcggtgctgaagaacttcgacatcgcgcgggaacagtaccagcgccaggccgggacccactggtatcggctggacttggacgccaccgatcatctgaccctgcaagcggtgcggggggagttcccgatcgtgggggtgtggcagaacggcttgatcgtggaacgggacgggcagttgcgggcggtgggcgcgaatccggcccggcacaacctgtatccgctgaaagcccggctgctccagggcgagccgctgcgagtgatgaccgagcgggtggcgatgcaaggccggaccctgcgttggctggtcgggcgcatcgatccaactcgcccgtattacctgctgggcgaggtggagatggccgacgcccgcgcccaggcccgcatcgccctcctgacggacatcgagacttacaacccggccagctatcggggcggcatcctcaccctgcactacgcccgcgcccaggagctcgaaccgtggctggacctggtggcggtccggggcgaggtgatcgtgcagttctggctccggcccggcgaggcggcggtgaccctggggccgggggcggaacggcactgccattaa

SEQ ID NO: 264 - protein, 363 aa, Unknown
  Obtained from environmental sample
  DOMAIN (35)...(124): Predicted membrane-bound metal-dependent hydrolase (DUF457)
MILPTHLAFASVLYLGGAALFGYRPDAVGWALATVACLLPDVDLPTAKIGRLCWFVAVPLERRFGHRTVTHSAVGLLAVAGLALPLWWIEPLYFWAVVGGYWSHLWLDMLNLRGVDLFWPSPIRVVTPGNRQWRFQVGGKGEMILLAGLLVVTVALYPLSHLGFRDGLQAVLKNFDIAREQYQRQAGTHWYRLDLDATDHLTLQAVRGEFPIVGVWQNGLIVERDGQLRAVGANPARHNLYPLKARLLQGEPLRVMTERVAMQGRTLRWLVGRIDPTRPYYLLGEVEMADARAQARIALLTDIETYNPASYRGGILTLHYARAQELEPWLDLVAVRGEVIVQFWLRPGEAAVTLGPGAERHCH

SEQ ID NO: 265 - DNA, 1632 bp, Unknown
  Obtained from environmental sample
atgaaagaacaagccattcatccgatcatttacgtgcgcggctacgcgatgactcaaaacgaaatcgaggacacggtggccgacccgtatatgggtttcaatatcggctcgtgcaagatccgccaggtctgggatgggtcggtgaagaaatatttctttgaatcaccactcgtgcgcttgatgaaggagttcgattacgacgacgtgtatgaacaaggcatcgacgccgtgggcgatgcccgttccctcgccgccgatagcggccccgtcggctaccggagtatcgtcatttatcgctactacgaaccctcctcggatgacctcggcacaggtcaaaagcccgatatgaagcgctttgcgactggcctgggcgaactcatcctgctgttgcgtgaccggctgtatcccaacggcgccgccacggtcatctccgcagccgagaaagcaaaggggaaattaccctacaacaaattccgcgttcatctcgtggcccattcgatgggaggactggtttgtcgcgcttttctccaaaatcccgcgttcggcactgctgaatcccgaggactcgtggacaaggtgttcacctatgcgacgccacacaacggcatcgaagttggcgtcgtcggcaacgtgccaagttggttatcgctttacggcatgaacaccttcaatcgggacgaaatagcgactctcttgaccctgaaaaaagccgatcgcgatggtgataatgtggatatcgtcaccaattttgatcccacccggattttcaatctggtgggcacaaatcccgccgattacaaaaccgcggccgggctatcgagccttgccgttggtgacgccagcgacggattggtgcgaattaaaaatgccacgacgcgcgggcgcgacgggaagacattcatccagtcgccccaggcgttcgtgcatcgcagtcactccggctacttcggcatcgtcaacagtgaggaaggttaccaaaacctgatccgctttctgttcggggacgtccgggcagacggttatctggacattgacgaacttacgttgccgccagcggtgcaaaaggaatacgacgccggcaaagaggtgcgcgcgtcctatttgtttgaggtgacggtgagcattcgcggaaaactgtggcaattgcatcgccgcacagtgaacgagaacagcgccatctttcgcaaattcgatgaattatttcccaaatggaacgcccaaaagaaagtgtgggtgccagatccatcggccagcccgatgttgttcaacgtctttctcgaccaggcgcaaagccaaaataagaagaccctggcattcgccgtagatctatgcgtgcgcgtaccgcagtacgaagtagatggctttctctttttcaaaaatcattttgaaggcgggtacctgtttcgcgacatggtggcgctggaagccacgccaccggctacgaaaaaagatgcctggaaggtcgaatacacttttgccagcaagcaaggtcaacctcctggactcgccaaggtagtggctcatgaagatcacacgctgactttcgagattccgatcgagcagcctaatccgccagggatcacggcccgcttgcgagtcgagacacgcttctggaacgattggaacacgtag

SEQ ID NO: 266 - protein, 543 aa, Unknown
  Obtained from environmental sample
MKEQAIHPIIYVRGYAMTQNEIEDTVADPYMGFNIGSCKIRQVWDGSVKKYFFESPLVRLMKEFDYDDVYEQGIDAVGDARSLAADSGPVGYRSIVIYRYYEPSSDDLGTGQKPDMKRFATGLGELILLLRDRLYPNGAATVISAAEKAKGKLPYNKFRVHLVAHSMGGLVCRAFLQNPAFGTAESRGLVDKVFTYATPHNGIEVGVVGNVPSWLSLYGMNTFNRDEIATLLTLKKADRDGDNVDIVTNFDPTRIFNLVGTNPADYKTAAGLSSLAVGDASDGLVRIKNATTRGRDGKTFIQSPQAFVHRSHSGYFGIVNSEEGYQNLIRFLFGDVRADGYLDIDELTLPPAVQKEYDAGKEVRASYLFEVTVSIRGKLWQLHRRTVNENSAIFRKFDELFPKWNAQKKVWVPDPSASPMLFNVFLDQAQSQNKKTLAFAVDLCVRVPQYEVDGFLFFKNHFEGGYLFRDMVALEATPPATKKDAWKVEYTFASKQGQPPGLAKVVAHEDHTLTFEIPIEQPNPPGITARLRVETRFWNDWNT

SEQ ID NO: 267 - DNA, 807 bp, Unknown
  Obtained from environmental sample
atgcttgtctcgctcctagagaacggaagccaagaagagcgggagtacgccaaggcgcacaacgtgtcgttgtcaccgttgtttgaaggtggacatcattttgtgttgagtgtgacgaccatcgccactcctcatgacgggacgacgcttgtcaacatggtcgatttcaccgatcgcttttttgacttgcaaaaagcggtgttggaagcggcggctgtcgccagcaacgtgccgtacacgagtcaagtatacgattttaagcttgaccaatggggactgcgccgccagccgggtgaatcgttcgaccattattttgaacggctcaagcgctcccctgtttggacgtccacagataccgcccgctacgatttatccgtttccggagctgagaagttgaatcaatgggtgcaagcaagcccgaatacgtattatttgagctttgccacagaacggacgtatcgcggagcgctcacaggcaactattatcccgaactcggaatgaatgcattcagcgcggtcgtatgcgctccgtttctcggttcgtaccgcaatccgacgctcggcattgacgaccgctggcttgaaaacgatggcattgtcaatacggtttccatgaacggtccaaagcgtggatcaagcgatcggatcgtaccgtatgatggggcgttgaaaaaaggggtttggaatgacatgggaacgtacaatgtcgaccatttggaaatcatcggcgttgacccgaatccgtcatttgatattcgcgccttttatttgcgacttgccgagcagttggcgagcttgcggccttaa

SEQ ID NO: 268 - protein, 268 aa, Unknown
  Obtained from environmental sample
MLVSLLENGSQEEREYAKAHNVSLSPLFEGGHHFVLSVTTIATPHDGTTLVNMVDFTDRFFDLQKAVLEAAAVASNVPYTSQVYDFKLDQWGLRRQPGESFDHYFERLKRSPVWTSTDTARYDLSVSGAEKLNQWVQASPNTYYLSFATERTYRGALTGNYYPELGMNAFSAVVCAPFLGSYRNPTLGIDDRWLENDGIVNTVSMNGPKRGSSDRIVPYDGALKKGVWNDMGTYNVDHLEIIGVDPNPSFDIRAFYLRLAEQLASLRP

SEQ ID NO: 269 - DNA, 1689 bp, Unknown
  Obtained from environmental sample
atgggattgtttgactacaaaaaagccgacggcaaagcgttgtacagcgatgccatcgcgctgacgctgtattcctacacgccgaccgggcagcctttgcccggcaccggttgggcgccactgggcgcctcggccctgggttatcaaggcaagaccgacgcgaaagggacgttcttcggcgagaaggacggtttcaccagcgccgaggcggaagtgctcggcaagtacgacgccgccggcaagctgatcggtatcggcgtggcctttcgcggcacgggcgggctgagttacagcgacaccttcggcgacatgaagaacaatctgctggccgccatcgggccggtggattacgccaaaaactacgcgaagaacgccttcgacaacctgctcaaatccgtggccgcgtttgccacggcccatggcatcgcggccaaggacgtgctgatcagcggccacagcctcggcgggcttggggtcaacagcgtggcggaactgagcgcgagcgactggggcggattcttcaaggacgccaactacatttccttcgcctcgccgacccagagcagcaccggcaccaacgtgttgaatatcggcttcgagaatgacccggtgttccgtgtgctcgacggcaccacgttcagcacggcgtcgatgggcaaacacgacaagccgcacgactcgaccaccgataacatcgtcaacttcaacgacaactacgcgtccactgcgcagaacctggtgccgttcagcatcgtcaacccgctgaactggtcggcccacagttcgctgggctatgccgatggcctgaaccgggtgatcgactcgaagttctacaacctcaccagccaggactcgaccatcatcgtgtccaacctggaagcctcgtcccggggcaagacctgggtcgaggatctgggccgcagcggcgagccgcacaccggtagcaccttcatcatcggcaccgacagcaacgactggctcaagggcggggcgggcaacgacttcctcgaaggccgtgccggcgatgatctgttccgcgatgacgggggcttcaacattctgttgggtggtcagggtcacaacaccttcgacctgcagaagccattgcagaacttcagcttcgccaacgacggcgacggcacgctgtacgtgcgcgacgcctacggcggcatcagcatgacccgcgacatcggcgcaatcgtcagcaaagagtccggttcaatgtggagcagcaaggaaatcacctggaccgtcaccggcaaaggcctggccaacggcgccgaactgacccagtacaaccattcgctcaacggcggcgcactcggcgatacgctgaaagccaccgcggacggcgactggctgtttggcctgggtggcgacgatcacctggtcagcgacaaggcccatgtgactttcgtcggcggcaccggcaacgatgtcatgaatgcggtgggtggcaacaacaccttccttttcagcggcgcgttcggcttcgactcgatccatggctaccagggcagcgacaaactggtgttcatgggtgtgcagggcgcggggcagggctacgactacaagcaacatgcttcgcagtccggcgccgataccgtgctgaagattggcgactatgccgtgaccctgatcggggtgggtgtggctaacctgtcggactcgagtttcgtgttcgcttga

SEQ ID NO: 270 - protein, 562 aa, Unknown
  Obtained from environmental sample
  DOMAIN (82)...(212): Lipase (class 3)
  DOMAIN (328)...(345): Hemolysin-type calcium-binding repeat (2 copies)
MGLFDYKKADGKALYSDAIALTLYSYTPTGQPLPGTGWAPLGASALGYQGKTDAKGTFFGEKDGFTSAEAEVLGKYDAAGKLIGIGVAFRGTGGLSYSDTFGDMKNNLLAAIGPVDYAKNYAKNAFDNLLKSVAAFATAHGIAAKDVLISGHSLGGLGVNSVAELSASDWGGFFKDANYISFASPTQSSTGTNVLNIGFENDPVFRVLDGTTFSTASMGKHDKPHDSTTDNIVNFNDNYASTAQNLVPFSIVNPLNWSAHSSLGYADGLNRVIDSKFYNLTSQDSTIIVSNLEASSRGKTWVEDLGRSGEPHTGSTFIIGTDSNDWLKGGAGNDFLEGRAGDDLFRDDGGFNILLGGQGHNTFDLQKPLQNFSFANDGDGTLYVRDAYGGISMTRDIGAIVSKESGSMWSSKEITWTVTGKGLANGAELTQYNHSLNGGALGDTLKATADGDWLFGLGGDDHLVSDKAHVTFVGGTGNDVMNAVGGNNTFLFSGAFGFDSIHGYQGSDKLVFMGVQGAGQGYDYKQHASQSGADTVLKIGDYAVTLIGVGVANLSDSSFVFA

SEQ ID NO: 271 - DNA, 756 bp, Unknown
  Obtained from environmental sample
gtgcttgtcgtgcatggttttgtggaaaacttcctctattttaccgaatactatgccgacccagaccttgagctgattctgctgaccagcgcggattaccatgtgcctgtcacccaggccacccatcagcaagctgcctgggccaaggcacccaaagagcgcctgggaactattgcctatgatgctgaggttttaattctggggttggaacacctggtcaatggccaggaagtgcgtgtgcacggccattcccgcggtggtgctgtggtactggaagccgcccgtcgtcgcccggatctatttgagcaggttgaagtgattcttgaggcacccgtgttgcctcagggcaaaccttatgccgaactgccccccagcgtgcgctggttcctgccctttgtactgcccttctggcaacagcaacccatctcgccccgcaacaaggccatctgggggccgctggatgatcggcgcaaacgctctctgatcatggggctgccgttcaaccccaaacattgcagcatcctcatggccaacattaaggatatggcggaatggatgccgggcaatggcagtgagctgtatcagaacgttaaacgtggcgccattctagtgcctggcaatgacaaggtgctggagccccgcgccatgctcgccagtgcccgacaggcagaaaatctgcaagtgattgaaatcgaaaacggcagtcattttgttatccctgaccaccctgattcgattccgcccttgccggcatga

SEQ ID NO: 272 - protein, 251 aa, Unknown
  Obtained from environmental sample
MLVVHGFVENFLYFTEYYADPDLELILLTSADYHVPVTQATHQQAAWAKAPKERLGTIAYDAEVLILGLEHLVNGQEVRVHGHSRGGAVVLEAARRRPDLFEQVEVILEAPVLPQGKPYAELPPSVRWFLPFVLPFWQQQPISPRNKAIWGPLDDRRKRSLIMGLPFNPKHCSILMANIKDMAEWMPGNGSELYQNVKRGAILVPGNDKVLEPRAMLASARQAENLQVIEIENGSHFVIPDHPDSIPPLPA

SEQ ID NO: 273 - DNA, 2244 bp, Unknown
  Obtained from environmental sample
atgaaagcacgtcgatcgttgagacaagccggatgcgcaaggttttttttattgctgatcattttgttgtttggctctcagcagctatgggcccagggatcaggatcttcgacgcataagaggccaaagatcgcattggttttaggcggcggcggcgccaggggcgctgcgcacatcggcgtgctcaaggtgctcgaggcgaacaggataccgatcgatctggtggtgggcacgagcatgggctctattgtcggcgggctgtatgcatcaggcatggctccggaagagatcgaaaagcagatcaacgccatcgactgggtcgagatgttccaggaccggccggatgaacagcacctttcattcagaaataagaaggaccagcagcgccttacttccatagagatggggatcaaagacggcggtgtagcgcttccttttggcgttatggcagggcagaagctgggttttgttttaaagaaaataacgctcccggttgctgagatcactgattttgacaagctctctataccttttcgcgcggtgtccaccaatctgcgctccggagagagagtggtgcttaaaaacggcagccttgcagaggccatgcgcgccagtatgtccattcccggcgtttggccgccggttgagcgcgaagggctgatcctggttgacggatttctggtatgcaacgtgcccgtagaggtcgccaaagagatgggagcggatatcattattgcggtcagcgtggatgctccgctggccccggataagaagttcgggtctttgatcgacgtgatcggccagatgaccgcgatctttgcccagcagaacgtcgaaaagtcgcgttctctgatcgatgataacgatttatacctcaatccggaccccggcatctcgcccggtgattttattaaaatgcctgacgcgatcaagataggtgcggaatcggcccaggcagttgtcgataaacttaagcgttactctgtatccgaatcagaatataaattattccttgctcagcagcgaaggcagggtacttatcaggagaccattcaggagatcaggattacgggcttaagccgagtttccgagcctcaggtgaggggcagaatgcagactcaggccggcaagcctttagatgttgtgaagcttcaggatgacatcaccaggatttatgctatgggcgattttgagtccgttgattttaagctgctggatgaaaacggcaagaacgtccttgtgatcgttcccaaagaaaaaccatggggccccaagtatttgcgtttcgggctcaatcttgccggcaataccagcgcacggaacgaattcggcacgcttttcgattttcgtatgaggcagatgaacgagctgggcgctgagtggaagaacgttctggaaatgggagcgacccggggcatcttcagcgagtggtaccagccgctcgatacgcgggattattttttcgttgccccgtttctcaaggcacagcggaatctcgccgatgtatatgacggcgatcaacgcaccgctacctatgaaaagaaatatatgggcgggggactgggtgccggggtgaatttcaagtcatacgcccaggcgcgagttgattatattgcaggcgtgatcaatgccaagccggacaccggaggcgcagggcttccgactttcagcaacaccaaggagggcgcgctgcaatttacgctcgacttcgaccagctggataaccataaattccccaaaaacgggtttaagatggtcacgaaatattacgaatcagctgattcgctgggaggagattactcctacaaaaaggcggagatctttttaggaaaagccactactccgatacccaggcatagcattcttaccatgttgacaataggaacgacgtttgataacaatgcgccgtattacgataaatatacgctgggaggttttttaaatcactccggctacagcgatcgccagctggtcggccagcataaaggattaggccagctgctgtattactataaattcggcaaagacccgatgggctcaggaggcaacctgtatctgggagccggagcggaatacggcaatgcctttgagaggtggcatgatacgaagttagacgatatgctcctcagcggattgctttttatcggcctcgattctccgttaggcccgatgtatatctcattcgcccagggcgaaggagactcagaaggccggatctatctgtatctgggaaagacattctga

SEQ ID NO: 274 - protein, 747 aa, Unknown
  Obtained from environmental sample
  SIGNAL (1)...(31)
  DOMAIN (46)...(237): Patatin-like phospholipase
  DOMAIN (376)...(747): Surface antigen
MKARRSLRQAGCARFFLLLIILLFGSQQLWAQGSGSSTHKRPKIALVLGGGGARGAAHIGVLKVLEANRIPIDLVVGTSMGSIVGGLYASGMAPEEIEKQINAIDWVEMFQDRPDEQHLSFRNKKDQQRLTSIEMGIKDGGVALPFGVMAGQKLGFVLKKITLPVAEITDFDKLSIPFRAVSTNLRSGERVVLKNGSLAEAMRASMSIPGVWPPVEREGLILVDGFLVCNVPVEVAKEMGADIIIAVSVDAPLAPDKKFGSLIDVIGQMTAIFAQQNVEKSRSLIDDNDLYLNPDPGISPGDFIKMPDAIKIGAESAQAVVDKLKRYSVSESEYKLFLAQQRRQGTYQETIQEIRITGLSRVSEPQVRGRMQTQAGKPLDVVKLQDDITRIYAMGDFESVDFKLLDENGKNVLVIVPKEKPWGPKYLRFGLNLAGNTSARNEFGTLFDFRMRQMNELGAEWKNVLEMGATRGIFSEWYQPLDTRDYFFVAPFLKAQRNLADVYDGDQRTATYEKKYMGGGLGAGVNFKSYAQARVDYIAGVINAKPDTGGAGLPTFSNTKEGALQFTLDFDQLDNHKFPKNGFKMVTKYYESADSLGGDYSYKKAEIFLGKATTPIPRHSILTMLTIGTTFDNNAPYYDKYTLGGFLNHSGYSDRQLVGQHKGLGQLLYYYKFGKDPMGSGGNLYLGAGAEYGNAFERWHDTKLDDMLLSGLLFIGLDSPLGPMYISFAQGEGDSEGRIYLYLGKTF

SEQ ID NO: 275 - DNA, 1260 bp, Unknown
  Obtained from environmental sample
gtgattaaagagattttactggccgatacccataactatcacggtattttagatgaacgttttattgatttagctcaccagttcagccgtcttcaagatgctagaacaggacaaggtggagctgctttagcggtttattttagaggtcagaaagttgtagatatctacaccggtctaaaatcacaaactgaagcttggcaacctgatactttggcagtttgctactctacagggaaaggtgtacttgcaaccttagcacatattttagtcagtgaaggttttttagaatatgacaaaccgattgcgacttactggcctgagtttgctcagaatggtaaagagcaaatgactttgcgtcatgtcctaagccatcaaagcggcatgtttgatattcgaaatattattgaaagtgcgagggaaatgctcgactggcgacatatgttggatgtaatggctatgtccaagccaagattcattgcaggacagggcaacgcttatcaagctttaacatttggttggcttgttggtggagtacttgaaaaagcaactggtcaatctttagatcaactcatgcaaaaatatctcattgaaccgttgcagttagatggtgcttattttggtacgcctgcaagccagttggaacgggtagctcgtttaattattcaaccgaaaccagaaaaaccagcatctgctcaagctgaaaaacctaacaaacctcagccacgcaaaagttcactttctgaaaaaatgattacatggactgggcaggacccgcaagattttcaggatgctatgattccaaaaggaatgaagaattttagtttctttagtgatgaaggattgcaagctgttattccagcagcaaatggtacatttactgcgaatagtcttgctaaaatttatgcgatgctggcaaataaaggcgaatgggatggacagcaactcattcgcccagaagtatttaaagagctgagtaccattcaaagttatgcacgtgatcgtgtcatgccaataccgatgaattggcgcttaggatatcaccgtattattacgatgggtaaacgtgctaaaaatggctttgggcatattggctacaatggttcaggggcatggtgtgaccctgagcgtgatcttagctttgcttatacccataactttcagattggttcaatcacgggtgactatcgtttatggggattgactcaagaaaccttacgctgcactgaccaagttttaaaagggcgtaaaggttggttctaa

SEQ ID NO: 276 - protein, 419 aa, Unknown
  Obtained from environmental sample
  DOMAIN (28)...(403): Beta-lactamase
MIKEILLADTHNYHGILDERFIDLAHQFSRLQDARTGQGGAALAVYFRGQKVVDIYTGLKSQTEAWQPDTLAVCYSTGKGVLATLAHILVSEGFLEYDKPIATYWPEFAQNGKEQMTLRHVLSHQSGMFDIRNIIESAREMLDWRHMLDVMAMSKPRFIAGQGNAYQALTFGWLVGGVLEKATGQSLDQLMQKYLIEPLQLDGAYFGTPASQLERVARLIIQPKPEKPASAQAEKPNKPQPRKSSLSEKMITWTGQDPQDFQDAMIPKGMKNFSFFSDEGLQAVIPAANGTFTANSLAKIYAMLANKGEWDGQQLIRPEVFKELSTIQSYARDRVMPIPMNWRLGYHRIITMGKRAKNGFGHIGYNGSGAWCDPERDLSFAYTHNFQIGSITGDYRLWGLTQETLRCTDQVLKGRKGWF

SEQ ID NO: 277 - DNA, 1509 bp, Unknown
  Obtained from environmental sample
atggtcaatcccagtattccactgattgaaacggtacagggccagttgatgggtgtcgtacaggatgacatccatctctggcgcggtattccttacgccgcgccaccgacgggagaacgtcgctggcgagcgccgcagccggtcactccctggtcagggattcgtaatgcgaataccttctccagcgccagctggcaggacattgagtactgcaaagagttgggcggcggcgatcccggcgcattttctgaagattgtctctatctcaacgtctggtctccggcggagcgacatcagccgcttccggtgatggtctggctgcacggtggcggctacaccattggtgccggcaatctgccgccttatgacggcgttgcgctggcgaagcgtaacgtggttgtcgttaccgtcaactatcgcttgggtcatcttggcttttttgcccatccggcgctggaaggtgaagagagtgaggctctcaataactttgcgctcctcgaccagattgctgcgctgcgctgggtacaggaaaacatcgccgcgttcggtggcgatccgcagaacgttacgctgtttggtgaatcggccggggcgcgtagcgtgctctcgctgttagcttcgccgcgaggaaaagggctgtttcataaagcgattgtccagagcggctacacgttgccggacacgcctcgtgaaatagcgctggaaaacggcgttgcgctggctgaacattttggcttgcagaatgcgacggcggaacagctacgcgcgattccggccgaggccttctggccgctgggcgcaccgtacaaaattgcgccgacacctatctccggcgatgcggtactgccggagccaatgctggacgtctttttcgccgccagacagcacccgatgcccgtcatgattggttctaacagcgatgaagccagcgtgatggccgtcttcggcgtcgatcttgccggacaaattcagaaactgcgtcgtgaacgcaggctgggactcggcctgattaagctgctgtatccgggcgtgaagggcgatgaagaactggggcgacaggtgtgtcgggatatggcgtttacggcattaggctatgtggtgatgcaggcgcaacagcgggtcggcgagccgtgctggcgttactggttcgattacgttgcggaatcggagcatcacacctatgccaacggcgcctggcatggcaacgaagtgccttacgtctttaataccttaacgctcgctgaaccttcgcgaaattatgtgaacgaaaacgatctcgccttcgctgtccacgttgcggattactgggtcaattttgcccgtcatgccagtcggacctgcgatgttctgcatggcccggtccgctggcctgcctgtattcagggccgcgatcgggtgttacgtattgggctgaaaaagtttgccggttttaaggtcgagaaccggtttatgcgggcgcggctttcgctctttaaacgggtgatggcccagcacgtcagtctcgactag

SEQ ID NO: 278 - protein, 502 aa, Unknown
  Obtained from environmental sample
  DOMAIN (2)...(482): Carboxylesterase
MVNPSIPLIETVQGQLMGVVQDDIHLWRGIPYAAPPTGERRWRAPQPVTPWSGIRNANTFSSASWQDIEYCKELGGGDPGAFSEDCLYLNVWSPAERHQPLPVMVWLHGGGYTIGAGNLPPYDGVALAKRNVVVVTVNYRLGHLGFFAHPALEGEESEALNNFALLDQIAALRWVQENIAAFGGDPQNVTLFGESAGARSVLSLLASPRGKGLFHKAIVQSGYTLPDTPREIALENGVALAEHFGLQNATAEQLRAIPAEAFWPLGAPYKIAPTPISGDAVLPEPMLDVFFAARQHPMPVMIGSNSDEASVMAVFGVDLAGQIQKLRRERRLGLGLIKLLYPGVKGDEELGRQVCRDMAFTALGYVVMQAQQRVGEPCWRYWFDYVAESEHHTYANGAWHGNEVPYVFNTLTLAEPSRNYVNENDLAFAVHVADYWVNFARHASRTCDVLHGPVRWPACIQGRDRVLRIGLKKFAGFKVENRFMRARLSLFKRVMAQHVSLD

SEQ ID NO: 279 - DNA, 1245 bp, Unknown
  Obtained from environmental sample
atgttctggttggcacttatctgggccctgctggccctgaatctgtattacccctggaagggcaaacccgaggtcggtggcgtgatcagcttcgccttcgggctgttggtgggcgaactcgccttgcatgtgattgcgctgcaagttctcactaccctgctgtttatcaccttctgcggcctgtcaggcttcggcgatgcgctggggctgatgctcgccatggccacctggctggcgatggcctggttctacgcacgcagcgagcgcgcggggcccgcgatggagagcggcattcgccaggccctgggcgaagactattcaaaactgatttcggccgagcgcagcgactgcctgcaccgcgacatagattatcggcagctgcttaacccctttgccttcagcaaacccgaagtgacccgacaccgcaatctgccctacgcggaagtggacggcaaaaacctttatttggatatcttccaccaccgcgacaagccacaaaacgcgccagtactgctgcaaattcacggcggcgcctggctgcagaatctgggcaacaaggatcagcaggcgctgccgctgatgaatgaactggccagccgcggctgggtgtgcgtgacggtgcaatatcggctgagtcccggcgtcaccatgcccacccatattattgactgcaagcgcgcgctggcctgggcgaaggagcatatcgctgattacggtggcgatccgaacttcattatcgtcaccggcggttccgctggcgggcatctgtcagcgatggtggcgctcaccgccaaccagcccgaattccagccgggtttcgaggacacggatacccgcgtacaaggtgccgtacctttctacggtatccacgactttaccaacagccgtggtcagcgcgagcataaggggctggagaacttcatcgcgcaacgcgtaatgaaagtgacccgctacgataaccccaaactgtgggagcaatgctctcccctgtttcaggtaaaagacgacgcgcctccgatgctgttggtacacggcgaggccgataccctggcaccgatcagcgaatcgcaggccttgctggaggttttgcgggaacacgacgtcaaagcggggctggcggcactgcccgatgcgcagcacgccttcgaactgatgtactcgctgcgcaccctgtatatgattaatgccgtggagcgcttcggcaacgcactgcacggcaagtatctacaggatggcgcagcttaa

SEQ ID NO: 280 - protein, 414 aa, Unknown
  Obtained from environmental sample
MFWLALIWALLALNLYYPWKGKPEVGGVISFAFGLLVGELALHVIALQVLTTLLFITFCGLSGFGDALGLMLAMATWLAMAWFYARSERAGPAMESGIRQALGEDYSKLISAERSDCLHRDIDYRQLLNPFAFSKPEVTRHRNLPYAEVDGKNLYLDIFHHRDKPQNAPVLLQIHGGAWLQNLGNKDQQALPLMNELASRGWVCVTVQYRLSPGVTMPTHIIDCKRALAWAKEHIADYGGDPNFIIVTGGSAGGHLSAMVALTANQPEFQPGFEDTDTRVQGAVPFYGIHDFTNSRGQREHKGLENFIAQRVMKVTRYDNPKLWEQCSPLFQVKDDAPPMLLVHGEADTLAPISESQALLEVLREHDVKAGLAALPDAQHAFELMYSLRTLYMINAVERFGNALHGKYLQDGAA

SEQ ID NO: 281 - DNA, 1254 bp, Unknown
  Obtained from environmental sample
atgaaagcgaaagttcaatttttcatcgctgttggttttattttttccatgtttactactccttttgtaacaaaggcacaagcggaaccttcagctcaatcaattggaaatgactatccgctcatactcgttcatggattaactggttggggcccggaggaaatgttaggcttcaaatattggggcggacataatgacatcgaagctcttttgaataacaatggccacagaacatttactgctgcggttggtccagtttcgagtaactgggatcgtgctgtggaactctattattatattaaaggcggaacagtagattatggcgcagcacatgcaaaagagcatggtcactcacggtatggtcggacacacactggaatctacagcgagtggaatggaataaataaaattcatctagttggtcatagcatgggtggacaaacaatacgaacgttaagtgatctattgatagatggaagtgctgatgaaaaggattatcataaggcgcatacggaagagggaatttctccattatttgaaggagggaagaattgggtccatagcataacaagtatcgcttcacctcataatggatctacttttgcagataaggaagaaatgatagacttcatcaagaagatggtaattgatatggctactctctcggggattaacagcagagataacattgtctatgattttaagctggatcaatggggactgaaacgcaatccaggtgaatcattcacttcatatatggaacgagtcatggagagttctatttgggagagtaaagatattagtgcatttgatttaaccacttggggtgcagcagaacttaatagctgggcagatacaaacccaaatatgtattatttctcctatacaggtaatgcaacatatcgtttgttaacaggtcgttattatccgatggggacgatgaatccgatgttgtggagttctagtcttcacataggatcatataccagaaatagccctgcacctgtaatcgataaaacctggtggccgaatgatggcttagtgagtgtagtatcgggaaaataccctttcaatcatccattcaagcagtttgatggcgtggctgagaagggcgtatggaattaccatcaagtacaacttgcatgggaccacctagactatgttggcatcagtgctgcccacctaataggtattagagaaattaatagtttctataacaatatggctaatcagcttcatagtctgccgaggtaa

SEQ ID NO: 282 - protein, 417 aa, Unknown
  Obtained from environmental sample
  SIGNAL (1)...(28)
MKAKVQFFIAVGFIFSMFTTPFVTKAQAEPSAQSIGNDYPLILVHGLTGWGPEEMLGFKYWGGHNDIEALLNNNGHRTFTAAVGPVSSNWDRAVELYYYIKGGTVDYGAAHAKEHGHSRYGRTHTGIYSEWNGINKIHLVGHSMGGQTIRTLSDLLIDGSADEKDYHKAHTEEGISPLFEGGKNWVHSITSIASPHNGSTFADKEEMIDFIKKMVIDMATLSGINSRDNIVYDFKLDQWGLKRNPGESFTSYMERVMESSIWESKDISAFDLTTWGAAELNSWADTNPNMYYFSYTGNATYRLLTGRYYPMGTMNPMLWSSSLHIGSYTRNSPAPVIDKTWWPNDGLVSVVSGKYPFNHPFKQFDGVAEKGVWNYHQVQLAWDHLDYVGISAAHLIGIREINSFYNNMANQLHSLPR

SEQ ID NO: 283 - DNA, 966 bp, Unknown
  Obtained from environmental sample
atgacggctgttctgatcggcgcgggggttctggcggggctcatcctcgccgtgctggcgggtttcgcggcgttctcgcgccatgtcgcgcgcaaggtggaggcggcgctgccggcgcgcgggcgtttcaccgcggtgacgggcgggcggattcactgggtggaggcgggctcagggccgcccatcgtcttcatccacggcctcgccggcaatctgcacaatttcacccattcgctcaccgaccgcctgaccggcgatttccgcgtcatcgtcatcgaccggccgggctgcggttggtcggagcgggacggggatgggcgcgcccggctgccggagcaggcgcggatggtcgcggaattcctggaggcggaggggatcgagcgcccgctggtcgccggccattccctcggcggcgccgtggcgctgaccctcgcggttctgcatccggagcgcgtcggcgggctcgccctgatcgcgccgctggtcgcgcgggtgacggacccgccggcggtgttccgcggcatcgcgctggaaaactcaggtctgcgccgcctcgtcgcgctcacgctcgccgcgccgatggggatccgcaacggcccgaaaaccctcgccgccatcttcgcgccggatgcggccccgaaggatttcgcgatgcgcgccggcggcgttctgggtctcagacccgccggtttctacgccgccgcgaccgacctctacgccgcgccgctcgacatcgaggcgatcggcgcgcgccatggcgagatcgcctgcccggcgggcattctctatggcgacgccgacgcggtgctggacgcgcagacccatctcggcgcgctcgccgcggccctgcccggcgcggaggcggagatcatccccggcgccggccacatgctgccgatctcgcatgcggatgagacggaggcgttcatgcggcggatggcggggcgggtgttttcggggagatga

SEQ ID NO: 284 - protein, 321 aa, Unknown
  Obtained from environmental sample
  DOMAIN (87)...(312): alpha/beta hydrolase fold
MTAVLIGAGVLAGLILAVLAGFAAFSRHVARKVEAALPARGRFTAVTGGRIHWVEAGSGPPIVFIHGLAGNLHNFTHSLTDRLTGDFRVIVIDRPGCGWSERDGDGRARLPEQARMVAEFLEAEGIERPLVAGHSLGGAVALTLAVLHPERVGGLALIAPLVARVTDPPAVFRGIALENSGLRRLVALTLAAPMGIRNGPKTLAAIFAPDAAPKDFAMRAGGVLGLRPAGFYAAATDLYAAPLDIEAIGARHGEIACPAGILYGDADAVLDAQTHLGALAAALPGAEAEIIPGAGHMLPISHADETEAFMRRMAGRVFSGR

SEQ ID NO: 285 - DNA, 408 bp, Unknown
  Obtained from environmental sample
atgggaacggtgatcggatcggaactcctggcgcaggcgctcaaggcgcagggcgtggatacgatgttctacgtcatgggcggcccgatgctcgagacggaggcgaccgccatcaagctcggcatccgggcgatcgacacccgccacgagcaggcggccgcgctcgcggcgcatgcgtggacgcgggtgatgcgccgccctgcggtggccatgggctgctccggccccggcgccacgaatctcttgaccggcgtggcgaacgccttcaccgatgcagccccgctcgtggccatcggcggcgccagcccccgcgtgtcgctcaacatggaggcgttccaggagatcgaccaggtggcgatcatgcggcccgtcaccaagtgggcccagcgcatctacgacgcccggcgg

SEQ ID NO: 286 - protein, 136 aa, Unknown
  Obtained from environmental sample
  DOMAIN (2)...(136): Thiamine pyrophosphate enzyme, N-terminal TPP binding domain
MGTVIGSELLAQALKAQGVDTMFYVMGGPMLETEATAIKLGIRAIDTRHEQAAALAAHAWTRVMRRPAVAMGCSGPGATNLLTGVANAFTDAAPLVAIGGASPRVSLNMEAFQEIDQVAIMRPVTKWAQRIYDARR

SEQ ID NO: 287 - DNA, 996 bp, Unknown
  Obtained from environmental sample
atgaagcggatttctgggatattgagggttattggggtgattttgttgcttttgctggcaggactgctggttgtcccattgatcttgcctgtaccccctttgcaggacatccggaatgtaaatgaattaaaagacccagacagccagttcatccagatccagggtattcaggtccactacaagaagtacggtgccggtgaacccgcgatcattttgcttcatgggtttggcgccagtacgttttcctggcgggaggtggtggaaccactttctgttcatggtacggtcattgcttacgaccgccccgcctttgggttgaccagccgtcctatgcccaaagactggcagggtataaatccgtacagcgttgaaggcaatatttctcttttggttggattaatggatcgtcttggagtcaatcaggcaatcctgattggaaactcagcggggggcaggctggcaatgcagatggctctggctcatcccgaacgagtttctgggttaattctggtagatgccgctatttatcagggtggaggagttcagtcatcattcattcgtgccctcatgaacactcctcaattgaaccgcattggaccttatttgttgagatctgcttttgcaggcgagcagggacaatccctgatttcaatggcttggcacgatccttcgaaattaaccccagaagtaatagaaggatatcgcaaacctcttcatatggaaaactgggatcgcgccttgtgggagtttaccaaagcaggcagcggtagtgaagatctctccctccgttttgctgaattgaccatgccggtactcgtcgtgaccggggatgatgatcgtatcgtacccacatcgctcagcctgaaactggctgaggaaattcctcaggcgcaactggtagttttttcaaattgtggccatgttccacaggaagaatgccctgatcagtttttgaaagcagttgaagaatttcttggcaggtataaatttcaatag

SEQ ID NO: 288 - protein, 331 aa, Unknown
  Obtained from environmental sample
  DOMAIN (94)...(323): alpha/beta hydrolase fold
  DOMAIN (48)...(329): Ndr family
MKRISGILRVIGVILLLLLAGLLVVPLILPVPPLQDIRNVNELKDPDSQFIQIQGIQVHYKKYGAGEPAIILLHGFGASTFSWREVVEPLSVHGTVIAYDRPAFGLTSRPMPKDWQGINPYSVEGNISLLVGLMDRLGVNQAILIGNSAGGRLAMQMALAHPERVSGLILVDAAIYQGGGVQSSFIRALMNTPQLNRIGPYLLRSAFAGEQGQSLISMAWHDPSKLTPEVIEGYRKPLHMENWDRALWEFTKAGSGSEDLSLRFAELTMPVLVVTGDDDRIVPTSLSLKLAEEIPQAQLVVFSNCGHVPQEECPDQFLKAVEEFLGRYKFQ

SEQ ID NO: 289 - DNA, 966 bp, Unknown
  Obtained from environmental sample
atgacgccgcgcggggcgagccgagcgctcgcactcctgaccgtgggcctgaccttgctcgcctgcgcgcccgcaccgccggggccggctggcgccgtgccgagcacaccgacgcgcgcctggctgccgaacgatgcgccgccgcgggcggcgatcctggcgctccacggcttcaacgactacagcaacgcattcgcggatttcggcgcctatgtggccgcgcgcggcgtcgcggtgcacgcctacgaccagcgggggttcggcgccaacgcggacgcgggctactggcccggcgtcccggtcatggtggcggatctgcggcgcgaggtggagcggctgaaagagctctacccggagctgccgatctacgtgctgggcgagagcatgggcgcggcggtggtgatcgcggccgccgcccggggcgagtcgcccgacgtcgccggctcgatcctggcggcgcccgccgtctggggcggagagcagctgaacccgctctatcgcgccaccttgtggatcgcggtgcagctggtcccgaacatgcggctcaccgggcgcgggctcgaggtgctggcctccgacaacatcgacatgctgcgcgcgctcggcgaggacccgctggtgatcaagggcacccgggtgaacgcgatcgcggggctggtcgggctcatggacctggccctgcccggagcggccgccgtgcccggcccgcttctggtgctgggcggcgcccgggacgagatcgtgccgccgcgcgcgcacgcggccatgctcgagcgcctgaccgcgcagccgtgcaccgaggtggtctatcccgagggctggcacatgctactgcgcgacctgcagcggcgggtggtctgggacgacatcctggcctggatcgacggcgagccgctgccgtccgagttcgacggcccctgcgggatcgacctcaggtcggtcgtcgcatcgctgccacgatcctga

SEQ ID NO: 290 - protein, 321 aa, Unknown
  Obtained from environmental sample
  SIGNAL (1)...(32)
MTPRGASRALALLTVGLTLLACAPAPPGPAGAVPSTPTRAWLPNDAPPRAAILALHGFNDYSNAFADFGAYVAARGVAVHAYDQRGFGANADAGYWPGVPVMVADLRREVERLKELYPELPIYVLGESMGAAVVIAAAARGESPDVAGSILAAPAVWGGEQLNPLYRATLWIAVQLVPNMRLTGRGLEVLASDNIDMLRALGEDPLVIKGTRVNAIAGLVGLMDLALPGAAAVPGPLLVLGGARDEIVPPRAHAAMLERLTAQPCTEVVYPEGWHMLLRDLQRRVVWDDILAWIDGEPLPSEFDGPCGIDLRSVVASLPRS

SEQ ID NO: 291 - DNA, 1851 bp, Unknown
  Obtained from environmental sample
atgcccgtattcgattaccgacagctcgacagcactgcctcctctgcgctgtacaaggacgccatggcgctggctacctacgcctaccatggcatcgacgatggcttcagcgccggctaccagaagtacggcttcggccttggcctgccggccacgctggtcaaggcgctgatcggcggcaccgacagccagggggtgatccccggtattccctggaaccccgactccgaagccagggccctggcccaggtaaaggccgccggctggtcgccgatcagcgcggcgcaactgggctaccagggcaagaccgacgcccgcggtaccttccacggcgaagcgccgggctacacctcggcgcaggtggagatcctcggccgctacgatgccgccggccagctcagcggtatcggcatcgctttccgcggcaccagcggcccgcgtgagaacctgctgggcgacaccatcggtgacgccatcaacgacctgctggcggcgatcggcccggcaggctatgcccgtgattacgccggtaacgcattcgggcagttgctcgccgatgtggccgcctttgccaaggccaatggcctgagcggcgcggacatcaccgtcagcggtcacagcctcggcggcctggcggtcaacagcctggccgacctgagcggctcgcgctggggtggtttctaccaggatgcgcgctacgtcgccttcgcctcgccgacccaggccgccgacgccagcaaggtgctcaatatcggctacgagaacgacccggtgttccgtgtgctcgatggcacctcggcgacctggggcaccctgggcgtgcacgacggcgccaaggcctcggccaccaacaacatcgtcaacttcaatgaccattacgcgtccgacgcctggaacctgctgccgttctccatcggcaacatcgccacctggctgtcgcacctgccgacggcctacaccgatggccttgggcgtgtgctggattcctccttctaccagtggaccagccgcgactcgaccatcctggtcagcaacctgtcggacgtgacccgtggctcgacctgggtcgaggatctcaaccgcaatgccgagccgcacaagggcagcacgttcattatcggctcggacaaggacgacctgatccatggcgggcgcggcaacgactacctcgaaggccgggccggcaacgataccttccgcgatgacggcggtttcaacctgatcgacggtggcgccggccatgacaccctgaagctgcaggatgccttggccaacctgagcatcgcccgggatggcgaaggcacgctgtacgtgcgtgacgccgagggcggcatcagcctggtgcgcaatgtcgaaaacctggtgagcaaggagtcgagcctgctgatcttcagcaaggaagtcagtcacggggtggcggcgcaggggttgttcgaaagcggcaaggtcaccccctatgcgtcctcgctcaacggcacccaggcaggcgaccagctggtggcgggtaatcaggggcagtggctgttcggcctgggcggtgacgaccgactgcagggcggcgccggcaatgacgtgctggtcggcggcacgggcaacgatgtgctgatgggtggcggggggcgcgacaccttcctgttcagcggccatttcggccaggaccgggtgctggacttcaccggccaggatcgactggtgttcattggcgtggaaggcggcaccgccgcgccggactggcgtgcccatgccagccaggtgggggatgacctggtgctgaagttcggcggggacagcgtgacgctggtggggattgcggggcagggcgttggggatgggcagatcgtgatcgcctga

SEQ ID NO: 292 - protein, 616 aa, Unknown
  Obtained from environmental sample
  DOMAIN (133)...(266): Lipase (class 3)
  DOMAIN (382)...(399): Hemolysin-type calcium-binding repeat (2 copies)
MPVFDYRQLDSTASSALYKDAMALATYAYHGIDDGFSAGYQKYGFGLGLPATLVKALIGGTDSQGVIPGIPWNPDSEARALAQVKAAGWSPISAAQLGYQGKTDARGTFHGEAPGYTSAQVEILGRYDAAGQLSGIGIAFRGTSGPRENLLGDTIGDAINDLLAAIGPAGYARDYAGNAFGQLLADVAAFAKANGLSGADITVSGHSLGGLAVNSLADLSGSRWGGFYQDARYVAFASPTQAADASKVLNIGYENDPVFRVLDGTSATWGTLGVHDGAKASATNNIVNFNDHYASDAWNLLPFSIGNIATWLSHLPTAYTDGLGRVLDSSFYQWTSRDSTILVSNLSDVTRGSTWVEDLNRNAEPHKGSTFIIGSDKDDLIHGGRGNDYLEGRAGNDTFRDDGGFNLIDGGAGHDTLKLQDALANLSIARDGEGTLYVRDAEGGISLVRNVENLVSKESSLLIFSKEVSHGVAAQGLFESGKVTPYASSLNGTQAGDQLVAGNQGQWLFGLGGDDRLQGGAGNDVLVGGTGNDVLMGGGGRDTFLFSGHFGQDRVLDFTGQDRLVFIGVEGGTAAPDWRAHASQVGDDLVLKFGGDSVTLVGIAGQGVGDGQIVIA

SEQ ID NO: 293 - DNA, 858 bp, Unknown
  Obtained from environmental sample
atgcacttccttgcgcctcaaatcagggacgactttgagaaccagaacggaccgatcaagatccgccttagccatcctgaatccaaacagcctcccatactttttgtaccagggtcattctctggagcatggatttggcaaggaaacttcttcgagcattttcatcaagccggttacgacgttgcggcaatgagcttctctgggcatggtcagcagggttggccgttgtggcgacggggtttgtctgcatttgagcgtgatctcgagatggctattgagcaattcgaaacccctccgatattgattgcacactccctgggcggcttgatagcccaacgggttgcgtaccgggtgcgtgttagggcattggcactactatccccgatccctttacatggtctcgcaggtagcgcgctttcattggcgaagaagtcgccaatcagtattcttaagcttgcagcagtatctcttgagccgagacttgcacgcctaggcgagcctccgctgggaatctattcaccccatgtcgggcagaaagtacgcaccgctatcactggaagattacaggccgagtccccttttgcactcatgcagagccttcttcctaactccaatgccacacactcgactccatgccccattcacttctggggtgccgagggggatcacataattccggcaaatgaagttcggcgtgccgcccaagcaatgtgggctccatcaaaaatattcccgggcatgagtcacacaatacaagccgaaccgaactggcaaatggttgccgaccatgttctgaagtgggtcgaaaaacagggtcaaaaactgcaaaaacgcggggctaaagcacgtcaacagtga

SEQ ID NO: 294 - protein, 285 aa, Unknown
  Obtained from environmental sample
MHFLAPQIRDDFENQNGPIKIRLSHPESKQPPILFVPGSFSGAWIWQGNFFEHFHQAGYDVAAMSFSGHGQQGWPLWRRGLSAFERDLEMAIEQFETPPILIAHSLGGLIAQRVAYRVRVRALALLSPIPLHGLAGSALSLAKKSPISILKLAAVSLEPRLARLGEPPLGIYSPHVGQKVRTAITGRLQAESPFALMQSLLPNSNATHSTPCPIHFWGAEGDHIIPANEVRRAAQAMWAPSKIFPGMSHTIQAEPNWQMVADHVLKWVEKQGQKLQKRGAKARQQ

SEQ ID NO: 295 - DNA, 1050 bp, Unknown
  Obtained from environmental sample
atgataccaatggatgccggtttttcccgctcaaacaggatcgttatgagaatcagccttattcacgttgctttgctgctcggcccgcttttcccggttagcgcactttccgccgccgaccagctgcgccgcggcgaacgcaaggaaacaaccaaggccgaagccccgcgcaaggaggagaagaaggacgagccggcgcaatcgcccgtcgagatcatcaagaacatttcctaccgggacgatgaggccgccgacccgacgcgccacaagctcgacctgtacctgccgcgcggcgccaaggacttcccgattgtctttttcgtccacggcggcgcctggcgagccggcaacaaggatgagtatcccagacttggcgaattctttgccaccgagggcattggctgcgtcgtcatcaattaccgcctctcccccaaggtgcagcatcccgcccatattgaagacgtcgcccgtgccttcgcctggaccgtcgccaacatcgaaaaatacggcggccgtaaagatcgcattttcgccgtgggccactcggccggcggccacctggtcgccctgctggccaccgatgccacgtacctcaagaacgaaggactggcgctgaccgacattcgcggcgtgatccccattagcggcgtgcatcagatcaactcggccctgccgatgttccgtaacattttcagcagggacaaggaggagtgccggcttgcctcgcccatcacccatgtcagcaatggccacccgcctttcctgctcctttacgctgagaacgacctgccgctcttgggcaggatggccgaggacatgagcgaggtgctgaagaagaatcagtgcgatgtcgaatgcctgaagattgaccagcgcaaccacatgacgatcatcacccagctttcccaggaaaatgacccgacgcggcaagcggtcttcgacttcatcggccggcatagcgactggcagcccgcggccagggccgaggctgccaacggcaataagcgcgaagccggcacgacggacgccgctatgaaggacgacaaatga

SEQ ID NO: 296 - protein, 349 aa, Unknown
  Obtained from environmental sample
  SIGNAL (1)...(38)
MIPMDAGFSRSNRIVMRISLIHVALLLGPLFPVSALSAADQLRRGERKETTKAEAPRKEEKKDEPAQSPVEIIKNISYRDDEAADPTRHKLDLYLPRGAKDFPIVFFVHGGAWRAGNKDEYPRLGEFFATEGIGCVVINYRLSPKVQHPAHIEDVARAFAWTVANIEKYGGRKDRIFAVGHSAGGHLVALLATDATYLKNEGLALTDIRGVIPISGVHQINSALPMFRNIFSRDKEECRLASPITHVSNGHPPFLLLYAENDLPLLGRMAEDMSEVLKKNQCDVECLKIDQRNHMTIITQLSQENDPTRQAVFDFIGRHSDWQPAARAEAANGNKREAGTTDAAMKDDK

SEQ ID NO: 297 - DNA, 1500 bp, Unknown
  Obtained from environmental sample
  misc_feature (1387)...(1404): n = A,T,C or G
atgggcgtgtttgactataaaaaccttggggccgagggctccaaagcattgtttgccgatgccatggcgatcacgttgtatacctaccacaacctggataacggctttgccgtgggctaccagcacaatggcctgggcgtcggcttgccggctactctggtcggcgcattgctcggcagtacggactcccagggtgtgatcccaggcattccctggaacccggattcggagaaggccgcgctcgaagcggtgcagaaggctgggtggacgcccatcagcgccagcaccctcgggtataccggcaaggtcgacgcccggggcacgttcttcggcgaaaaggccggctataccacagcccaggtcgaggtgctgggcaagtacgatgacgcgggccagttgcaggaaatcggcatcggttttcgcggcacgtctggcccaagggagacgctgatcaccgactccatcggcgatctggtcagcgacctgcttgcggcgctgggtcccaaggattacgcgaagaactacgccggcgaagcattcggcggcttgctcaagaacgtcgccgagtatgcggcggcccacggtctgagcggccaggatgtgctggtcagcggccatagcctcggcggcctggcggtcaacagcatggccgacttgagcgacgccaagtggtccgggttctataaggacgccaactacttggcctacgcctcaccgacccagagtgccagcgacaaggtgcttaatatcggctacgaaaacgacccggtgttccgcgctttggacggctcatccgccaacctgtcgacgctcggggttcacgacaaaccccacgagtccaccactgacaacattgtcaacttcaacgatcactacgcctcgaccctgtggaatgtgctgccgttttccatcgccaatctgccgacctggatctcgcacttgccgaccggctacggcgacggcatggggcgcattctggagtcagggttctatgaacagatgaaccgggactcgacgattatcgtggccaatctatccgacccggcacgggccaccacttgggtgcaggacttgaaccgcaacgccgaaccgcacacaggcgacacttttatcattggcagcgatggcgatgatctgatccagggcggcaagggcgcggactttatcgaaggcggcaagggcaatgacacgatccgcgacagcagcgggcataacacctttttgttcaacggccagtttgggcaggatcgaattatcggttatcagccgacggataaactcgtgttcgagggtgtggcgggcagcggggattaccgtgatcacgccaaggtggtgggtggggatacggtgatcagtttcggggcggattcggtgacgttggtgggcnnnnnnnnnnnnnnnnnntggtcccccttccacagtgtgctttccttcagactggcgcttttgcgcgttgggatcagtcttctttgcggacggtggccacgtcatcggctttga

SEQ ID NO: 298 - protein, 499 aa, Unknown
  Obtained from environmental sample
  DOMAIN (133)...(265): Lipase (class 3)
  VARIANT (463)...(468): Xaa = Any Amino Acid
MGVFDYKNLGAEGSKALFADAMAITLYTYHNLDNGFAVGYQHNGLGVGLPATLVGALLGSTDSQGVIPGIPWNPDSEKAALEAVQKAGWTPISASTLGYTGKVDARGTFFGEKAGYTTAQVEVLGKYDDAGQLQEIGIGFRGTSGPRETLITDSIGDLVSDLLAALGPKDYAKNYAGEAFGGLLKNVAEYAAAHGLSGQDVLVSGHSLGGLAVNSMADLSDAKWSGFYKDANYLAYASPTQSASDKVLNIGYENDPVFRALDGSSANLSTLGVHDKPHESTTDNIVNFNDHYASTLWNVLPFSIANLPTWISHLPTGYGDGMGRILESGFYEQMNRDSTIIVANLSDPARATTWVQDLNRNAEPHTGDTFIIGSDGDDLIQGGKGADFIEGGKGNDTIRDSSGHNTFLFNGQFGQDRIIGYQPTDKLVFEGVAGSGDYRDHAKVVGGDTVISFGADSVTLVGXXXXXXWSPFHSVLSFRLALLRVGISLLCGRWPRHRL

SEQ ID NO: 299 - DNA, 945 bp, Unknown
  Obtained from environmental sample
atggctgatttgcacccaaaaatgaaatttttcctggagaatcttttgccaatccaggaaggagctgtacctacccttgaggaaattcgcgcaagaagtgctgcaatgccttcgggtacggtggaggaggtccaggaagtgtcagacagacttatccctggctctgaatccgacatcccagttcgcatttatactcctgaaggagagggaccatttccggtaaccgtatttttccacggcggaggatttgtatacgggggacttgatacccatgatgcggtctgcagaagcatcgtgaaggcttctggccagatggttgttgcggtagaataccggcttgctccggaaaatccgttccctgcagcacctgaagactgctttgcagccgcaaattgggtaaatgagaatgcagaaaagctaaacgctgaccgaactaagctaagcgtcgcgggagacagtgccggagggaatttggcaactgtagtctgcctgcttgcgagagagaggggaggcctgtctatcagcaagcaggttctgatctaccctgttacagataaataccagcctggaaaatatccgtcctatgaagagaatggaagcggctatttcctcacaactgactcgatggcattatttgcagccctttacattcaatctgaagagggacgtgacaatccgctttcggctccgatactggccaagaacttaagcgggctgccgcctgcactggtcattacggccgagtatgacccactaagggatgaaggcgaagcctatgctgaaaaactccgtgacgcgggagttgaagtgattttaaaaagggaagcaggccagattcacggctttttcaatctcttcagcattatggattccaaggatgatttaaaggacgtatatgcctatatcggcgagttcctaaatagtgaaatcgccgcagttctatag

SEQ ID NO: 300 - protein, 314 aa, Unknown
  Obtained from environmental sample
MADLHPKMKFFLENLLPIQEGAVPTLEEIRARSAAMPSGTVEEVQEVSDRLIPGSESDIPVRIYTPEGEGPFPVTVFFHGGGFVYGGLDTHDAVCRSIVKASGQMVVAVEYRLAPENPFPAAPEDCFAAANWVNENAEKLNADRTKLSVAGDSAGGNLATVVCLLARERGGLSISKQVLIYPVTDKYQPGKYPSYEENGSGYFLTTDSMALFAALYIQSEEGRDNPLSAPILAKNLSGLPPALVITAEYDPLRDEGEAYAEKLRDAGVEVILKREAGQIHGFFNLFSIMDSKDDLKDVYAYIGEFLNSEIAAVL

SEQ ID NO: 301 - DNA, 933 bp, Bacteria
atgccgctcgatcccgtcattcagcaggtgctcgatcaactcaaccgcatgcctgccccggactacaaacatctctccgcccagcaatttcgttcccaacagtcgctgtttcctcctgtcaagaaggagcccgtggccgaggtccgagagtttgacatggatctgcctggccgcacgctcaaggtgcgcatgtaccgcccggagggcgtcgaaccgccctaccccgcgctcgtgtattatcacggcggcggttgggtcgtcggagacctcgagacgcacgatcccgtctgccgcgtcctcgcgaaagacggccgcgcggtcgtgttctccgtcgactaccgcctggcgccggagcacaagttccctgccgccgtggaagacgcctacgacgcgcttcagtggatcgcggagcgcgcagcggactttcatctcgatccagcccgcatcgcggtcggcggagacagcgccggagggaatcttgccgctgtgacgagcatccttgccaaagagcgcggcgggccggccatcgcgttccagctgctcatctacccttccacggggtacgatccggctcatcctcccgcatctatcgaagaaaatgcggaaggctatctcctgaccggcggcatgatgctctggttccgggatcaatacttgaacagcctggaggaactcacgcatccgtggttttcacccgtcctctacccggacttgagcggcttgcctccggcgtacatcgcgacggcgcagtacgatccgctgcgcgacgtcggcaagctttacgcggaagcgctgaacaaggcgggcgtcaaggtcgagatcgagaacttcgaagatctgatccacggattcgcacagttttacagcctttcgcctggcgcgacgaaggcgctcgtccgcattgcggagaaacttcgagacgcgctggcctga

SEQ ID NO: 302 - protein, 310 aa, Bacteria
MPLDPVIQQVLDQLNRMPAPDYKHLSAQQFRSQQSLFPPVKKEPVAEVREFDMDLPGRTLKVRMYRPEGVEPPYPALVYYHGGGWVVGDLETHDPVCRVLAKDGRAVVFSVDYRLAPEHKFPAAVEDAYDALQWIAERAADFHLDPARIAVGGDSAGGNLAAVTSILAKERGGPAIAFQLLIYPSTGYDPAHPPASIEENAEGYLLTGGMMLWFRDQYLNSLEELTHPWFSPVLYPDLSGLPPAYIATAQYDPLRDVGKLYAEALNKAGVKVEIENFEDLIHGFAQFYSLSPGATKALVRIAEKLRDALA

SEQ ID NO: 303 - DNA, 810 bp, Unknown
  Obtained from environmental sample
atgacggcggagttcgcgacttcgctggcggacattccgacgacggagtatgaccaggagggtatccggggaagctggatcatgcccaatgatgcggattccgaacgcgtgcttttgtatcttcacggcggcggctacatagtcggaagcgatgaaacgccccgcgcgataaccgcatttctggcgcgcgaggcaaaagtgcggtgtttttccctggattatccgcttgcccccgagcatccatttccggctgcgctcgatagcgcggtgcgagcgtatgatatgctgttggaaaaggggttcagccctggaaacatcgtgctgggcggcgattcggccggcggcggcctggcgcttgccctgttgctcgccatccgggaacacgggctgccgatgccggcgggagcgtatctcctttccccgtggactgatttgacgcagagttttcccacgcattcacgcaaggccgatgtcgaaatcagcattacccccgagctgcttgaggaagcggcagccagctatgcgggtgattccgacagaaccaatccgcttatctcccccgcattcggcgagttccggggattcccgccgctcctgatacaagttggttcccatgaacgtctgttggacgactccctgacggtggcgcgcaatgccgccctcgccgatgtgccgacgacattgaaggtatggcccggctatccccatgtgtttcaagtctatcaccagaatctcgacggcgccaaaaaggcgttgagggaagccgcggaattcatcaccggagcgatggataaagagttgcttcaataa

SEQ ID NO: 304 - protein, 269 aa, Unknown
  Obtained from environmental sample
MTAEFATSLADIPTTEYDQEGIRGSWIMPNDADSERVLLYLHGGGYIVGSDETPRAITAFLAREAKVRCFSLDYPLAPEHPFPAALDSAVRAYDMLLEKGFSPGNIVLGGDSAGGGLALALLLAIREHGLPMPAGAYLLSPWTDLTQSFPTHSRKADVEISITPELLEEAAASYAGDSDRTNPLISPAFGEFRGFPPLLIQVGSHERLLDDSLTVARNAALADVPTTLKVWPGYPHVFQVYHQNLDGAKKALREAAEFITGAMDKELLQ

SEQ ID NO: 305 - DNA, 927 bp, Bacteria
ttgaaactcaaattcataacaacaatgcttttcgttttaagcaccttaccctttgcatctgccaacgccagtggttacacagaaaccaaataccccattgtcctcgttcatggactgtttggattcgataccctcgccggagttgattacttttatggcatcccacactctctgaccaaagatggtgcaacggtttatgtcgcgcaagtatctgcgaccaacagcagcgaggcacgtggagagcagcttcttgctcaagttgaaacactacttgccgcaacaggtgcagaaaaagtgaacttgattgggcatagccatggcggcccgacaacacgctacgttgcttcaatacgtcccgatttagtggcatccgttactagcattggtggtgtaaacaaaggctcaaaagtggcggacatcgtaagaaacaccgttccagaaggctccatcagtgaaggcgtagcagtaaagttggcagaagggctcgtaaccttgataaacctactgtctggtggttccgatcttgaccaagatccgcttgcttctttagccgcactcaccactgagggctcacttgagttcaaccaatattatcctgaaggtattccaaccagtgcatgtggagacggcgacttattggcatcgaatggcgtgtattactattcatggacaggctcttcgaactttaccaacctatttgacccaactgacggtgcaatggtggttttaggcttggcatttgatgggcccaacgacggtcttgtcgatgtatgtagcactcacctcggcaaagttattcgtgatgattacaagatgaatcatctggatgaaatcaacggactgcttggtatccaccacctcttcgagactgatccagtgacgttatatcgccagcatgctaatcgcctgaaactacagggtttataa

SEQ ID NO: 306 - protein, 308 aa, Bacteria
  SIGNAL (1)...(23)
  DOMAIN (42)...(299): alpha/beta hydrolase fold
MKLKFITTMLFVLSTLPFASANASGYTETKYPIVLVHGLFGFDTLAGVDYFYGIPHSLTKDGATVYVAQVSATNSSEARGEQLLAQVETLLAATGAEKVNLIGHSHGGPTTRYVASIRPDLVASVTSIGGVNKGSKVADIVRNTVPEGSISEGVAVKLAEGLVTLINLLSGGSDLDQDPLASLAALTTEGSLEFNQYYPEGIPTSACGDGDLLASNGVYYYSWTGSSNFTNLFDPTDGAMVVLGLAFDGPNDGLVDVCSTHLGKVIRDDYKMNHLDEINGLLGIHHLFETDPVTLYRQHANRLKLQGL

SEQ ID NO: 307 - DNA, 2040 bp, Unknown
  Obtained from environmental sample
atgcccaaaacctcgactaccgatccctggcgtgcgatccgcacccgggcgcagcgcacggtgcgcctgcttgcaggcggctccctgctatcactggctctcaccggcgcgcccgcactggccgcctacaccgggaacgcggctccctgcaataacggcaacccgcaagccggctcctggcaaggcgaggccacttacctgagcggtacctcgcgctatgactccggtgaatggatctataccgactatgtgttcgacgacggcgaactgctgaacaacgtcgccgacatcgtcgaattccgcgtctgccgggcggggaacgatctcaaggcgcgcgtcaccctcaactcgctgatggaaccggcgccggtggcgctggccgtggcagtggaatcggccaacggccgaagccggccctggccgcacaacgccggccttgaatcgaactggaaccagttcttcctggtaaccctggacgcagtcagcctcacccaagccaacggccgcacccagcagctgggtgcgcccgaggtggactacgagaacggcaccgtcagcttccgcctgccggccaccgcccgtggggcggccccggtgcggctggtggtcgccagcggcgagtggaccggcgaaggcttcggccagatggtcgacctggcgttcaacagccgtgaccgcgaagtgatgggcaccaacttccggtccatcgcccaaaatgccgccatcgccgacggcgacgtctccggcttctatgccgaggtggatctgctgaagctgcgccgccgggtaaccgacccgcaaatcaccgacagcggcttttacaaccgcatttaccgcagcgtgcaggacgtcgaaggcggctacgcctccagcttcccgaaataccaaggccgctggcagccctatggcctgtggattccaaaaggctacgacccggccgagccggctcccatgctgctgacgctgcacgccctgggatccacccacaacatgttcggcaccttcggcactttcccgaccatggccgatggcctgggcgcgattgccatcaccccgctggccatgggcaccgacggctggtactgggacgaagcgctggtggacaccttggacgcctgggccgacgccgaccgcgcctacaacattgatcgcgagcgggtgtactcctccggctactccatgggcggctacgcgacctatcgcctgaccacgctgttcccggacctgttcgccggggcggtgacctgggtcggcccgccggcgcaccagtactggctgccgccgttctcgccgtcaccggcgggtccgcgtcagcaggctggcaacaccagcacgatgatcgagaacgtcgcccatgtgccgttctacatcatcgccggcacgaccgacctgttggtcccggtcggcagcatcaacgcgcaggccaaccgtttcgcggcgctgggccatacctaccgctatgcgcttcacagcggcatgggccacttcgactacatcggctataacgactggacgcgcgagcgtgattggcttcagggccgtacccgcgtagtcaacccggcccaggtgtcgctgcgcattcggcccaacgcgctggccacctccaatctgccggagccgcgccggcaggcactgctcgatcacctcgccacgctaagcgcgcagctgggcggcgcggtggacggcgcttactggctgtcggggatcgccacctcggtgaccggcaaccagatcgcccaggtcgaactggtatccgccggtatcgccgagcgcaccccggtggttgagtcgttccagcgggcggaagccggtccgccgacgccgttcagcttgcgcggcgccgaccgcacctgggccgccgaaccggtagcgaacgcgctttccggccgactcgccggcgtcaccgagcttacggttgacctggcgcgggccgggctgttccgcaccggcctggacctgcagattacggttgatcagccggtcgcactgcaccttaaggaacgcgacggcagcatcgaaaccgtgcaactggcgccgtaa

SEQ ID NO: 308 - protein, 679 aa, Unknown
  Obtained from environmental sample
  SIGNAL (1)...(41)
MPKTSTTDPWRAIRTRAQRTVRLLAGGSLLSLALTGAPALAAYTGNAAPCNNGNPQAGSWQGEATYLSGTSRYDSGEWIYTDYVFDDGELLNNVADIVEFRVCRAGNDLKARVTLNSLMEPAPVALAVAVESANGRSRPWPHNAGLESNWNQFFLVTLDAVSLTQANGRTQQLGAPEVDYENGTVSFRLPATARGAAPVRLVVASGEWTGEGFGQMVDLAFNSRDREVMGTNFRSIAQNAAIADGDVSGFYAEVDLLKLRRRVTDPQITDSGFYNRIYRSVQDVEGGYASSFPKYQGRWQPYGLWIPKGYDPAEPAPMLLTLHALGSTHNMFGTFGTFPTMADGLGAIAITPLAMGTDGWYWDEALVDTLDAWADADRAYNIDRERVYSSGYSMGGYATYRLTTLFPDLFAGAVTWVGPPAHQYWLPPFSPSPAGPRQQAGNTSTMIENVAHVPFYIIAGTTDLLVPVGSINAQANRFAALGHTYRYALHSGMGHFDYIGYNDWTRERDWLQGRTRVVNPAQVSLRIRPNALATSNLPEPRRQALLDHLATLSAQLGGAVDGAYWLSGIATSVTGNQIAQVELVSAGIAERTPVVESFQRAEAGPPTPFSLRGADRTWAAEPVANALSGRLAGVTELTVDLARAGLFRTGLDLQITVDQPVALHLKERDGSIETVQLAP

SEQ ID NO: 309 - DNA, 1161 bp, Unknown
  Obtained from environmental sample
atggcgatgacaaacgaactgaacgagcaagtccaacacctgcttgacgagcgagtagcgtcaggtgaagagatcggcctccaggtcgcggtctacgtggatggcaggcaggtggtcgatacctgggccggggtggcggatgaggctaccggccgcaaggtggatggcgacaccctcttcacctcctggtccactacaaaagggtttgttgccacctgtgtccacatcctggcggactggggtctgctcgactatgacacaccggtggcaacctactggcccgaatttggcgccaatggcaaggaagccgtcaccgtacgccatgccaccacccacagcgccggcatcccgcagatgccagaaaatgtgacgccggagatgatgaccgactgggacgcgatgtgcgccgccattgccgcccacgaaccgctgtgggaacccggaacgaaaacgggttaccacgcctggacctttggctggattctgggcgagatcgtgcggcgggtcagtggccggtcgctggcgcagtttgcccaggaagagctgtgccgcccgctggggatcaccgatttctatctcggcatccccgatgcggcggagccgcgtgtggccccgctacgccaggacccgcaacatctggagaacaccctgagcgccggcgggttgaaccgccgcgttgcgcctcctcacgtgacaaccgccgcagtggtcaaccgacctgacttccgccgggcatcgatcccgggcggcggtggcatcatgaacgcccgcgccattgctcgccactatgccctgctggccggttttggcgcactggatggggtgcgcatcttgtcgccggagcgggtcgagatcatgcgcaccgtccagaccgacgccgaggacgtggtcatggggggactgactcgcaaagggctgggttattttctcggtggcgatgtggacaaaggagggcacgccgtcataggtcgtgccgagggcgcattcggccacgcgggcaacggtgggtcgattggctttgccgaccccgaacgcaaactggctttggggctgaccaagaactatatgcgggccgtgccggtaggccagccaagcacagcctatctggttgccgaactggtgcgtgcccatcttgacagccagcagacagtaacgccatga

SEQ ID NO: 310 - protein, 386 aa, Unknown
  Obtained from environmental sample
  DOMAIN (11)...(373): Beta-lactamase
MAMTNELNEQVQHLLDERVASGEEIGLQVAVYVDGRQVVDTWAGVADEATGRKVDGDTLFTSWSTTKGFVATCVHILADWGLLDYDTPVATYWPEFGANGKEAVTVRHATTHSAGIPQMPENVTPEMMTDWDAMCAAIAAHEPLWEPGTKTGYHAWTFGWILGEIVRRVSGRSLAQFAQEELCRPLGITDFYLGIPDAAEPRVAPLRQDPQHLENTLSAGGLNRRVAPPHVTTAAVVNRPDFRRASIPGGGGIMNARAIARHYALLAGFGALDGVRILSPERVEIMRTVQTDAEDVVMGGLTRKGLGYFLGGDVDKGGHAVIGRAEGAFGHAGNGGSIGFADPERKLALGLTKNYMRAVPVGQPSTAYLVAELVRAHLDSQQTVTP

SEQ ID NO: 311 - DNA, 1290 bp, Unknown
  Obtained from environmental sample
atgaaaaagatagtgatttattcatttgtagcaggggttatgacatcaggcggcgtatttgccgccagtgacaatattgtggagacgtcgaccccaccacagcatcaggccccaagcagacaggacagggcattattcgcgggtgatacaacaacctatataaaatgtgtctacaaagtggatggccaggatgacagcaatccatcctcatcttggttatgggcgaaagtgggtagcaactatgcgaagctgaaggggtattggtataattcaatgccgctggcaaacatgttttacactgaagtaccctatgcagaggtgatggacttgtgtaatagcaccctgaaggcggtaggtgccaactccactcttgttattccatatgcatcggattacaccctgtcctattactatgtgatttggaatcaaggggctaaccagccggttatcaacgttggcggcagagagcttgaccgtatggtggtctttggtgacagcttgagcgataccgtcaatgtctataacggctcgtacggtaccgtgccgaatagtacctcctggttattgggccatttctctaacggaaagctttggcatgaatacctttccacggtattgaatctgcctagctatgtgtgggcgactggcaatgcggagagtggagagaaacccttctttaacggattcagtaagcaggtggattctttcagggattatcacgctcgcactaaaggctacgatattagcaagacgttgtttaccgttctgtttggtggaaatgattttataacggggggaaaaagcgccgatgaggtcattgagcaatatacggtgtcattgaactacttggctcaactaggggcgaagcaggttgcaattttccgcttgccagatttttcagtgatacccagcgtttcaacgtggacagaggctgataaggacaaactgagagagaatagtgttcagtttaatgaccaagccgagaagctgatcgctaaactaaacgcggcacatccccaaacgacgttttatacgctgaggttggatgacgcttttaagcaggtgttggaaaacagcgaccaatacggctttgttaataagactgatacctgcctggatatttcccaaggcggatacaactatgccattggggcccgcgcgaaaacggcatgtaagagcagcaatgcggcgtttgtattctgggacaatatgcatccgaccaccaaaacacacggattgttggccgatcttttaaaagatgatgtggtacgcggcctcgctgcgccatga

SEQ ID NO: 312 - protein, 429 aa, Unknown
  Obtained from environmental sample
  SIGNAL (1)...(21)
  DOMAIN (160)...(418): GDSL-like Lipase/Acylhydrolase
MKKIVIYSFVAGVMTSGGVFAASDNIVETSTPPQHQAPSRQDRALFAGDTTTYIKCVYKVDGQDDSNPSSSWLWAKVGSNYAKLKGYWYNSMPLANMFYTEVPYAEVMDLCNSTLKAVGANSTLVIPYASDYTLSYYYVIWNQGANQPVINVGGRELDRMVVFGDSLSDTVNVYNGSYGTVPNSTSWLLGHFSNGKLWHEYLSTVLNLPSYVWATGNAESGEKPFFNGFSKQVDSFRDYHARTKGYDISKTLFTVLFGGNDFITGGKSADEVIEQYTVSLNYLAQLGAKQVAIFRLPDFSVIPSVSTWTEADKDKLRENSVQFNDQAEKLIAKLNAAHPQTTFYTLRLDDAFKQVLENSDQYGFVNKTDTCLDISQGGYNYAIGARAKTACKSSNAAFVFWDNMHPTTKTHGLLADLLKDDVVRGLAAP

SEQ ID NO: 313 - DNA, 987 bp, Unknown
  Obtained from environmental sample
atgccccgcccccgcgtgatcgcaggcgctgcagcgctggccgccatcgccggggcggccctgtggtggttcgccaccccctttgaaactggtgctggaacaggggcatacagcctgggtgcagcgccctccatcgcagccgccgccggggccggcgcgtcgccggggcagccccggaacggcagtttctcccatccagcaaggtgggggcccgaagcggacaactccgaccccttgctggtgcagggcttgcgcgacacgcttgaagccatgctgctggaagccggggatgcgggcgacccggcggccctcaagcaaaggctggcggcgctggtgggccagcacttcccagcagcgtttgccgcccgggcgctggccctggccgagcgctatgtggactaccgcgtcgcactgggcgggctgcgcgcgccgcaggacccgaccgatccccgtgcgctgcgcgacgcgctggaagcgcgccacaaggtgcgcgcacaatttttcgacggcgccgagtacgacgccctcttcgcccgcgaggccgaactggaccgctacaccctcgcgcgcctggagatcacccgcaacaccgcgctcacccccgagcagcgggcccaggccctgcaggctgcggaccaggagctttccagcgagcgccgcgcggaacgagccgcagcgaccgagcacctggctgcagccgcccagaccgcagccttcaacgcacagaacgcgagcgactacacgcgccacaccgcgcgcagcgcgcaatacggcgaggcggcggcccacgcgctggcccggctggaccgcgaagagcagcattggcagcaaaggctcgaccagtacagccaggcccgagcccagcaaggcgacaacagtgccgcgctgcagcaactgcgccagcagctcttttccagcgaggagcagcagcgcgtcgacgccgccctggcgctgcgcaagctcggccccgctcccgcgggctcctga

SEQ ID NO: 314 - protein, 328 aa, Unknown
  Obtained from environmental sample
  DOMAIN (42)...(321): Proteobacterial lipase chaperone protein
MPRPRVIAGAAALAAIAGAALWWFATPFETGAGTGAYSLGAAPSIAAAAGAGASPGQPRNGSFSHPARWGPEADNSDPLLVQGLRDTLEAMLLEAGDAGDPAALKQRLAALVGQHFPAAFAARALALAERYVDYRVALGGLRAPQDPTDPRALRDALEARHKVRAQFFDGAEYDALFAREAELDRYTLARLEITRNTALTPEQRAQALQAADQELSSERRAERAAATEHLAAAAQTAAFNAQNASDYTRHTARSAQYGEAAAHALARLDREEQHWQQRLDQYSQARAQQGDNSAALQQLRQQLFSSEEQQRVDAALALRKLGPAPAGS

SEQ ID NO: 315 - DNA, 771 bp, Unknown
  Obtained from environmental sample
atgaaaaaacttggacttgcattgggcggcggcgctgtgttgggggctgcccatatcggtgttctggaagccctggaggaaaggggtatcaggcccgaatatatcagcggaaccagcattggcgcttttgtcggtgctctctatgctttcggcaagacggcagccgagctcaaagaaatcgccctggaattggactggctcgatgtcaccaattttaaattgtcgaaaatggggttgttggggaatgacaggatcggtaaactgattcttgataacctgggaaaacaacagattgaagattctcaaatcaaactcgctattgtaacaacggatatctcaaatggggaaaaagtggtgctgaccgagggtccgctcttcaaggctgttatggccagttcttgcctgccgggcatatttattccggttgaatggggggatcgcctcctggttgacggggtcttaagcgaaaatgtgccggtatcacctctccgggatatgggggcagaagatattattgccgttgaccttacaacaaacagggactttaaacgtcccaatgatatcattgatgtactgtccaatacgtttgctattggcctcaataaaattgttatcgaacaactcgacgatacgcgaaccatcatgattcaaccgaaactgagcgcatacaacaaagcggatacccgaaaaatgaaggcgttgatcaaagaagggtatgaggagacatgccggattttggatcagcagcagctgaactccctgaaacactga

SEQ ID NO: 316 - protein, 256 aa, Unknown
  Obtained from environmental sample
  SIGNAL (1)...(24)
  DOMAIN (6)...(164): Patatin-like phospholipase
MKKLGLALGGGAVLGAAHIGVLEALEERGIRPEYISGTSIGAFVGALYAFGKTAAELKEIALELDWLDVTNFKLSKMGLLGNDRIGKLILDNLGKQQIEDSQIKLAIVTTDISNGEKVVLTEGPLFKAVMASSCLPGIFIPVEWGDRLLVDGVLSENVPVSPLRDMGAEDIIAVDLTTNRDFKRPNDIIDVLSNTFAIGLNKIVIEQLDDTRTIMIQPKLSAYNKADTRKMKALIKEGYEETCRILDQQQLNSLKH

SEQ ID NO: 317 - DNA, 786 bp, Unknown
  Obtained from environmental sample
gtgctcccctccgacgccggcaagtacaagtacctcgtcatcggcgggctcttcggcaagcacctgcctggctacatggacgagaacgtgaacgcgctgaagtcccaggggctggacgcgcgccaggtgccggtggactccgacgcctcggtgaagacgaacgccgagaccatccgcaaggccatcgaggaggcgacgaaggacggcagccaggtggtgctggtcggccacagcaagggcggcgtggacgcggcggcggcgctcgcgatgcacccggagctgaaggacaaggtccgcgccatggtcgccatccagtcgcccttcggcggctcgcccatcgcgcaggacatcgagtccacgcccatcatccggccgctggtgaacggcgtggtgggcgagctgttccgcggcgacccggcgagcgtgaaggacctcacctatgacgcgcgcgagaagttcctcgccaggtacccgctgcctgcggacgtgccctcggtgtgcgtggcgacctcgcggctgtcgccgacgtcgatcctcggcagctccgagggctacctcaaggcgcgctacgggttcccgtcggacgggctggtgaacccggcggacgccgtcatccccggctcgcacgtggtgcggctcaacgacatggaccacgcggagtccaccctccacgggctgcccggcttctccaactactacccgaaggacgtcaccctggcctcggtggcgctggcgctggacgccgcgcgcgagcaggacggggcgaagcacagcgaggcgttctag

SEQ ID NO: 318 - protein, 261 aa, Unknown
  Obtained from environmental sample
MLPSDAGKYKYLVIGGLFGKHLPGYMDENVNALKSQGLDARQVPVDSDASVKTNAETIRKAIEEATKDGSQVVLVGHSKGGVDAAAALAMHPELKDKVRAMVAIQSPFGGSPIAQDIESTPIIRPLVNGVVGELFRGDPASVKDLTYDAREKFLARYPLPADVPSVCVATSRLSPTSILGSSEGYLKARYGFPSDGLVNPADAVIPGSHVVRLNDMDHAESTLHGLPGFSNYYPKDVTLASVALALDAAREQDGAKHSEAF

SEQ ID NO: 319 - DNA, 942 bp, Unknown
  Obtained from environmental sample
atgaccggattctttggccgcgttctgcggcaattcgctctggccgcggccgctgcatggctgctcgtcggcgccagcgcccaggcccagacgggcgccacccagacgcgctatcccatcgtgctggtgcacggccttttcggctttgactcggccctgggtgtcgactacttctatggcatcccggacgccctgcgccagggcggcgcgaaggtctacgtggcacaggtctccgcagccaacagcaccgaggtgcggggcgagcagctgcttgcgcaggtgaacaccatcctcgccatcacgggtgccgccaaggtcaacctggtgggccactcgcacggcggccccaccgcgcgctacgtggccggcgtggcgccgggcaaggtcgcttcggtgacctcggtcggcggcgtcaaccgcggctcgcgggtggccgacatcatgcgcggcgtggcgcccgcgggctcggtgtccgaaaccatcgccagcggcgcggcatcggcgctggtcgcgctgatcaacctgacctcggggggctcgggcctgccgcagatgcccacggcggcgctcgactccctcaccacggccggcgccgccagcttcaaccgccgctttccccaaggcgtgcccacctccggctgcggcagcggcgccgaactcgtcaacggcgtgcgctactactcctggacgggcaccaagaccctgaccaatgtgctggacgccagcgatgccctgctgggcgtgctcggcctggtgttcggcgaagccaacgacgggctggtgtcggcctgctcgtcccgcctgggcaagcacctgggcgactaccgacagaaccatctggacgaggtgaaccagctggtcggcctgcgtgactggttttccaccgaccccgtgacgctgtaccgccagcacgccagccgcctgaagtcgcagggcctgtga

SEQ ID NO: 320 - protein, 313 aa, Unknown
  Obtained from environmental sample
  SIGNAL (1)...(29)
  DOMAIN (49)...(291): alpha/beta hydrolase fold
MTGFFGRVLRQFALAAAAAWLLVGASAQAQTGATQTRYPIVLVHGLFGFDSALGVDYFYGIPDALRQGGAKVYVAQVSAANSTEVRGEQLLAQVNTILAITGAAKVNLVGHSHGGPTARYVAGVAPGKVASVTSVGGVNRGSRVADIMRGVAPAGSVSETIASGAASALVALINLTSGGSGLPQMPTAALDSLTTAGAASFNRRFPQGVPTSGCGSGAELVNGVRYYSWTGTKTLTNVLDASDALLGVLGLVFGEANDGLVSACSSRLGKHLGDYRQNHLDEVNQLVGLRDWFSTDPVTLYRQHASRLKSQGL

SEQ ID NO: 321 - DNA, 672 bp, Unknown
  Obtained from environmental sample
atgaataaagtagttacactcattctgattatttgcctggcagcagcctgcagcaatgatcagaagaaaaacaatacgacagaagagaacaagatgcccgttcagaaagaaattaaaaacatcctttttttcggtaatagccttacagcagggtacggactcgacgatccctcagctcaatcattccccgcattgattcaaaataaaatagattctttaggtcttccttacagatgtattaatgcgggttcaagcggcgaaaccactgcaggaggcaaaagccgcatcggctggctcctgcgaaacaaggttgatgtatttgtccttgaactgggcgcgaacgacggactgcggggaataccggtaaaagaaacaaaagcaaaccttcaggcgattgtggatacagtcaggtcaaaatatccttcggctaagcttgtcctcctcggtatggaggtcccgcccaatatgggaggaagttatgccgccagcttccgtgtcattttcagggagatagcagaaaaaaacaatatgacattcgttcctttcctgcttgataacgtagccggaatcagcaggctgaaccaaaaagacggcatccacccaacaatggaaggggttcgaattatgactgaaaacgtgtggaaagagttaaagaaagttttgtcagattaa

SEQ ID NO: 322 - protein, 223 aa, Unknown
  Obtained from environmental sample
  DOMAIN (41)...(213): GDSL-like Lipase/Acylhydrolase
MNKVVTLILIICLAAACSNDQKKNNTTEENKMPVQKEIKNILFFGNSLTAGYGLDDPSAQSFPALIQNKIDSLGLPYRCINAGSSGETTAGGKSRIGWLLRNKVDVFVLELGANDGLRGIPVKETKANLQAIVDTVRSKYPSAKLVLLGMEVPPNMGGSYAASFRVIFREIAEKNNMTFVPFLLDNVAGISRLNQKDGIHPTMEGVRIMTENVWKELKKVLSD

SEQ ID NO: 323 - DNA, 660 bp, Unknown
  Obtained from environmental sample
gtgccagacctaagtaacacctccctgctgcaattcaacggctggacgctgcgggttcggcaagcggctgccagacctgcccgtctgctgctcatgctgcacggttacaccggcgacgaaaactccatgtgggtgtttgcgaaggacatgccgcctcattactggattgccgccccgcgcgcgcctttccccgccgagccgagaggctattcctggcgtccgcttcacccggcgacctttggccgccccagtctcgaagaacttgtgcctcaggctgaggcgttgattcgctttgtggacgagtaccaggcttcggcggggatcgaagcgtccgatttcgatgtgatgggattcagccagggcggagcgatgtccaacgtgctggcgttcctgtatccgcagcgcatccgcaaattggggatgctggcggggtttgtccccggcgggttggatgtgtatgccaaaaatcatccgcttcaagggaagcgggtgttcgtcacgcatggcacgcgcgatgacatggtgccgattgaccgcgcccgcgcctcggttgccgtgctggagcaggcaggcgcgcagattgtttattgtgaggatgaggttggtcacaaagtcagcctcaattgcctgcgcgcgctgcgctcgtatctggaagattag

SEQ ID NO: 324 - protein, 219 aa, Unknown
  Obtained from environmental sample
  DOMAIN (17)...(218): Phospholipase/Carboxylesterase
MPDLSNTSLLQFNGWTLRVRQAAARPARLLLMLHGYTGDENSMWVFAKDMPPHYWIAAPRAPFPAEPRGYSWRPLHPATFGRPSLEELVPQAEALIRFVDEYQASAGIEASDFDVMGFSQGGAMSNVLAFLYPQRIRKLGMLAGFVPGGLDVYAKNHPLQGKRVFVTHGTRDDMVPIDRARASVAVLEQAGAQIVYCEDEVGHKVSLNCLRALRSYLED

SEQ ID NO: 325 - DNA, 672 bp, Unknown
  Obtained from environmental sample
atgagaagaattgttttcctttatattctggcgttgctctgcgtatcctgtgcgaaccggaatccttctgtctcggaccccgctccgtcaccgaccttgggggagcaatcgtcagcgagtttaccgaagatcgtagcattcggcgacagcctaactgctggctttggtctttcccagaatgaaagttatccagcgcttttgcaggaacgactgagacaggacggttatgattacgaagtgatcaatgccggagtttcaggcgataccagcgcgggcggtgtgcgtaggatcgactgggttctggatgagagcgtacgaattctaattcttgaattgggtgctaatgattttcttcgtggccatccagtagctcagactaagaaaaacctcgccgttatcatcgaacgtgctcaggaaaaaaacgtcagggttctgctagcagggatgtttgcaccgacgaatactggatgggagtaccaggggcagatccagcaaatgtttaacgatctttcgcgagaaaaagccgtaccactaattccattctttctcgagggagtagccggcattccaactctgaatctagctgatggcattcatcccaatgcggctggcacaaagatcgttgctgagaatgtgtacaagtatctaaaaccgatgctcccatctgattaa

SEQ ID NO: 326 - protein, 223 aa, Unknown
  Obtained from environmental sample
  SIGNAL (1)...(25)
  DOMAIN (44)...(212): GDSL-like Lipase/Acylhydrolase
MRRIVFLYILALLCVSCANRNPSVSDPAPSPTLGEQSSASLPKIVAFGDSLTAGFGLSQNESYPALLQERLRQDGYDYEVINAGVSGDTSAGGVRRIDWVLDESVRILILELGANDFLRGHPVAQTKKNLAVIIERAQEKNVRVLLAGMFAPTNTGWEYQGQIQQMFNDLSREKAVPLIPFFLEGVAGIPTLNLADGIHPNAAGTKIVAENVYKYLKPMLPSD

SEQ ID NO: 327 - DNA, 1329 bp, Unknown
  Obtained from environmental sample
atgagcctcaacagccaagactacgctgcgctatccgaagatgcatacaaggattatgcggtcggtcgtcgagcgcctggtcaagaagaaatcgttccgatcaacgggcacaagtacaagatcctcgagcacgttgacaatcggctgaacggttatcagggaacgatctaccagcgagtcgacaccaatgaaattgtcgtcgcacatcgcggaaccgaacaaatcgcacgcgatgcgattctgaccgatggtggcatggtcgttgcccgtaccaatgtgcaggcgccagacgcaatcgcgctgacccaacgcgccctggcttacgccaagaaggaggggcaggatctcggccaacgtccgcctgaggtcaccgtcaccggccactccctcggcggcgctctggcccagatcacctcgcaccacttcaacgtcaagggcgagaccttcaacgcctatggcgcggtcagcctcagctaccgcatcccggaaggtggcaacaccatgatcaaccatgtcatggcctccgatccggtcagcgcggcgtcgccacatttcggccaggtgcggatctacgccaggccgaatgaaatcagcacgctcgccgcgaacggtttcagcaatcactcgttgcgcgcccttatccccgaccggccgatcatcgccgcaggcagctcgttcggcgcgcacaagctgggcaacttcctcggtgacggctcggtgctgcagcacccggaaacgcagaagctggcaaaagacaacgccaggatgatcgaggaataccgcgacgacgttgaattactgcgccgtggtgtcacccgcgcggcgcggggcattccgggcggcgccgtcgacctgtacgaccacatccgcggcccgctgcagcccggtgagccggcacgccgcgaagcggagaagaacggccatcacaccagcatgctgcgaatggacgatgccaaccatgtgggcaacccactgttcaacgacgcgatccgtggcgtgcacgcgcaggatgtccgcgtcggccgggtaccagacgtgatgagcacgcaactggcaggcagtctggccgccgaaatgcacgcagcaggcggcaagcgcatcgacgaagtggtcatgaatgccgatgcctcgcgcagcttcgccgtgcagggccagggcggtgaccccgcccaccttcgtgtgtcggtggatacggcagtggcgatgaacaccccgctggaacagagcagccagcgcatcgaccagcaggccgccgaccagcgcgttgcgctggagcgcgaccagcagctggaacagcagcggaaccagacccgcagcctgcaggcctga

SEQ ID NO: 328 - protein, 442 aa, Unknown
  Obtained from environmental sample
  DOMAIN (62)...(186): Lipase (class 3)
MSLNSQDYAALSEDAYKDYAVGRRAPGQEEIVPINGHKYKILEHVDNRLNGYQGTIYQRVDTNEIVVAHRGTEQIARDAILTDGGMVVARTNVQAPDAIALTQRALAYAKKEGQDLGQRPPEVTVTGHSLGGALAQITSHHFNVKGETFNAYGAVSLSYRIPEGGNTMINHVMASDPVSAASPHFGQVRIYARPNEISTLAANGFSNHSLRALIPDRPIIAAGSSFGAHKLGNFLGDGSVLQHPETQKLAKDNARMIEEYRDDVELLRRGVTRAARGIPGGAVDLYDHIRGPLQPGEPARREAEKNGHHTSMLRMDDANHVGNPLFNDAIRGVHAQDVRVGRVPDVMSTQLAGSLAAEMHAAGGKRIDEVVMNADASRSFAVQGQGGDPAHLRVSVDTAVAMNTPLEQSSQRIDQQAADQRVALERDQQLEQQRNQTRSLQA

SEQ ID NO: 329 - DNA, 1224 bp, Unknown
  Obtained from environmental sample
atgcgcattacggtcagaaaatttgttgccctgagtcttctgctttcgctggcgctcgtagcgcgtgcgcagacggtcagtccagaatcagtcggtttatcgtcagaacggctgcagcgcatcaacgacctcgtgcaggaaaatatggatgcaggccgcattaccggtgccgttacgctcgttgctcgtcatggcaagattgcacacctcgaagcgcagggagtgatggatattgcatccggaaaaccgatgaaaaccgacacgatctttcgcctggcgtcgatgtcgaaaccggtcgccggccttgcgatcatgatgctggtcgaggagggcaaggttggcctcaacgataatgtgtcggactatctgccgagtttcaaagcgcagcaggttgcggtacgcaagggagatggcgcagacaatttcgagcttgtgcctgccgagcgcgaaattacgatcaaggatttgctgacacatacttcaggcgtaatgagcggacagataagcagcaatgcgggcaatcccttgttcgtaacacgtcatgacatcggcctcgcctgggtcgatgaactcggcaaggcaccgctcgagtttcagcccggctcgcgctgggcctacagtgcgacggcaggtttcgacgtgctgagccgcattgtcgagcttgcttccgggcagacgttcaacgatttcttgcaagagcgcgtatttgctccgctcgatatggacgatatttttttctggcccaatgccgatcagcgtgaacgcattgtgagctcatacgtattgaacgagggcaagctggtgttacgcgacaaccccgattcgatgtcgggagaaaagtttttttcgggcgccggcggcctcatggcttccgccgaagcgtatgcgcagtttgcaatgctgctggcgcaaggcggtgaacttgatggcacacgtttgctcggcactcgtacgatggaagtgatgcgcgcgccattcatccctgactcgttgccgggccgcacgccgggcgaaggttatggcctcggcgtgcgcgtggtgaccgatccgatcaagatggcaagtttcgtatccgagggcacgttcggctggtcaggattttacggcacgcatttgtttgtcgaccccaaagaagaaattgtcggcatcctgctgatccagtccccgattggagcgatgcggcccgaatttgaaacagcggtgatgcaggctgtcatcgactga

SEQ ID NO: 330 - protein, 407 aa, Unknown
  Obtained from environmental sample
  SIGNAL (1)...(23)
  DOMAIN (41)...(407): Beta-lactamase
MRITVRKFVALSLLLSLALVARAQTVSPESVGLSSERLQRINDLVQENMDAGRITGAVTLVARHGKIAHLEAQGVMDIASGKPMKTDTIFRLASMSKPVAGLAIMMLVEEGKVGLNDNVSDYLPSFKAQQVAVRKGDGADNFELVPAEREITIKDLLTHTSGVMSGQISSNAGNPLFVTRHDIGLAWVDELGKAPLEFQPGSRWAYSATAGFDVLSRIVELASGQTFNDFLQERVFAPLDMDDIFFWPNADQRERIVSSYVLNEGKLVLRDNPDSMSGEKFFSGAGGLMASAEAYAQFAMLLAQGGELDGTRLLGTRTMEVMRAPFIPDSLPGRTPGEGYGLGVRVVTDPIKMASFVSEGTFGWSGFYGTHLFVDPKEEIVGILLIQSPIGAMRPEFETAVMQAVID

SEQ ID NO: 331 - DNA, 1245 bp, Unknown
  Obtained from environmental sample
atgttctggttggcacttatctgggccctgctggccctgaatctgtattacccctggaagggcaaacccgaggtcggtggcgtgatcagcttcgccttcgggctgttggtgggcgaactcgccttgcatgtgattgcactgcaagtcctcactaccctgctgtttatcaccttctgcggcctctcgggcttcggcgatgcgttgggcctgatgctcgccatggccacctggctggcgatggcctggttctacgcacgcagcgagcgcgcggggccggcgatggagaacggcattcgccaggccctgggcgaagactattcaaaactgatttcggccgagcgcagcgactgcctgcaccgcgacatagattaccggcagctgcttaacccctttgccttcagcaaacccgaagtgacccgacaccgcaatctgccctacgcggaagtggacggcaaaaaccttcatctggatatcttccaccaccgcgacaagccacaaaacgcgccagtactgctgcaaattcacggcggcgcctggctgcagaatctgggcaacaaggatcagcaggcactgccgctgatgaatgaactggccagccgcggctgggtttgcgtaacagtgcaataccggctgagccccggcgtcgccatgcccacccatattattgactgcaagcgcgcactggtctgggcgaaggagcatatcgccgattacggtggcgatccgaacttcattatcgtcaccggcggttccgctggcggccatctgtcagcgatggtggcgctcaccgccaaccaacccgaattccagccgggtttcgaggacacggatacccgcgtacaaggtgccgtacctttctacggtatccacgactttaccaacagccgtggtcagcgcgagcataaggggctggagaacttcatcgcgcaacgcgtaatgaaagtgacccgctacgataaccccaaactgtgggagcaatgctctcccctgtttcaggtaaaagacgacgcgcctccaatgctgttggtacacggcgaggccgataccctggcaccgatcagcgaatcgcaggccttgctggaggttttgcgggaacacgacgtcaaagcgggtctggcggcactccccgatgcgcagcacgccttcgaactgatgtactcgctgcgcaccctgtatatgattaacgccgtggagcgcttcggcaacgcgctgcacggcaagtatctacaggatggcgcagcttaa

SEQ ID NO: 332 - protein, 414 aa, Unknown
  Obtained from environmental sample
MFWLALIWALLALNLYYPWKGKPEVGGVISFAFGLLVGELALHVIALQVLTTLLFITFCGLSGFGDALGLMLAMATWLAMAWFYARSERAGPAMENGIRQALGEDYSKLISAERSDCLHRDIDYRQLLNPFAFSKPEVTRHRNLPYAEVDGKNLHLDIFHHRDKPQNAPVLLQIHGGAWLQNLGNKDQQALPLMNELASRGWVCVTVQYRLSPGVAMPTHIIDCKRALVWAKEHIADYGGDPNFIIVTGGSAGGHLSAMVALTANQPEFQPGFEDTDTRVQGAVPFYGIHDFTNSRGQREHKGLENFIAQRVMKVTRYDNPKLWEQCSPLFQVKDDAPPMLLVHGEADTLAPISESQALLEVLREHDVKAGLAALPDAQHAFELMYSLRTLYMINAVERFGNALHGKYLQDGAA

SEQ ID NO: 333 - DNA, 1104 bp, Unknown
  Obtained from environmental sample
atgcaagtcaatggtgcaattgcagttactgatccggcgttgagcaatgcagtggaagcaacctcttaccagacatctgaacagattgtgggtggagtaagcgaagcggcggaagcagggttggcggcagaagtgggcgcggcggagacgttcgctgcagctgacgatgttgccctttcatccatggtcgccggcccggctaatgatgcctcttacggcaacctgcccgcagggtgggatgaggcccggtttgatcatgccctggatatggccaagttgtcctctcaggcctacagcagtttcaatgacagaactgtagatcttctactggcgccgtttagcggtatcaatgacataaaaaatcaagatttctccaccgataattatctccctataaattccggtggcaaatctgacttcctgttgcccctgcagaatgggctggactatacggtcttccagcaagtcaccgatcctaatggtgtcgatcatgccgccaagactgccggcggcgatatcgttctttccttccggggcagtgaacccacatccgccccggattgggtgaacaatgtgaagcaggccgctggccattctccccaatatggggccgcggtaaatgtggcgagggatttgcagcagcaagtggatgcctataatgagaagcatgggcttgaaggcgacgctgccatgaagctccacttcaccggccacagcctgggtggcggattggccactgccgctgccctggctaccggtagcgaagcgacagtctttaatgctgccggtctctcagaccataccattaacaaccttggcctggacgcaagccatgccgacaaggtgaccaatattaacgtggaaggcgatctgctgagcgatggcaaccggcagaaggatgctcacaccacgggctctggtgtctttggcgataccaagcaatatggtgagcaggtctggctgcagggtgtagatgaccgcgcaagatttggcggccctctcaacttcctggtgccgggctttgtcaacgacctggccattcaggggcttaatcacgcctggcatgtgtatacctaccaattggaaaaccgcaactttgcctga

SEQ ID NO: 334 - protein, 367 aa, Unknown
  Obtained from environmental sample
MQVNGAIAVTDPALSNAVEATSYQTSEQIVGGVSEAAEAGLAAEVGAAETFAAADDVALSSMVAGPANDASYGNLPAGWDEARFDHALDMAKLSSQAYSSFNDRTVDLLLAPFSGINDIKNQDFSTDNYLPINSGGKSDFLLPLQNGLDYTVFQQVTDPNGVDHAAKTAGGDIVLSFRGSEPTSAPDWVNNVKQAAGHSPQYGAAVNVARDLQQQVDAYNEKHGLEGDAAMKLHFTGHSLGGGLATAAALATGSEATVFNAAGLSDHTINNLGLDASHADKVTNINVEGDLLSDGNRQKDAHTTGSGVFGDTKQYGEQVWLQGVDDRARFGGPLNFLVPGFVNDLAIQGLNHAWHVYTYQLENRNFA

SEQ ID NO: 335 - DNA, 1137 bp, Unknown
  Obtained from environmental sample
atggcccgcaagttcctctatcttatcgccctgcttgccgtgatggtcattgcagcgatcttcgcgctgcgcatctggcagaacgagctcacccgcttcgcattcgtaccgcgcgtggcttacgcccgcctcgatccgctgcctgcagatgcctatgccggcaaccggatgtggctcgcccgcccggggctcggtgatagcgatcccgcacagtggctccctgcaggagtaaggaagagtgccggtccgggcacatctgccgcagtgttcttcattcatccgaccagctatctcgcgcgcgaaagctggaacggtccgctcgacgataccgatacgaatcgccgggccacctatttcatccaaggtatggcctctgccttcaacgggcaggcacaggtctgggcaccgcgctatcggcaagccgccttcggcgcattcctcaccgacaaggccgagggcgagctggccctggactctgcctacctcgatgtccggcaggccttcgacgccttccttgcggcgacaccgcccgatgcaccgatcgtgctggcagggcacagccagggcgcgctccacctgatgcgcctcttgaaggaccggattgccggaacaccactcgctggccgggtggtagcggcctacccgatcggatggccgatctcggtcgagcatgatcttcccccgcttggccttccggcttgcgacaagagcgatgctactggctgcatcatgacgtggtcgagtttcgctgagcccgccgaaccgcaacttgtgttggaagcgtaccgcacgcgccccgcgcttgatgggaaagccaaggatgcaaagccggttctgtgcaccaacccgcttactggaagcatcggcggacaggcacccgcgtcggccaaccttggcacgctaaagcccagcaaggacctgaagagtggtgagttgatcgccaaggctgttccggcccgctgcgataccagcaccggcttgctgatgatcggggacccaccggaccttgggccgtttgtcctgccaggcaacaactaccacgtctatgacatccccctgttctgggcgaacctgcgcgcagatgtcggccggcggaccgcaacgtgggagaaggcacgcggagcggccgcccggtga

SEQ ID NO: 336 - protein, 378 aa, Unknown
  Obtained from environmental sample
MARKFLYLIALLAVMVIAAIFALRIWQNELTRFAFVPRVAYARLDPLPADAYAGNRMWLARPGLGDSDPAQWLPAGVRKSAGPGTSAAVFFIHPTSYLARESWNGPLDDTDTNRRATYFIQGMASAFNGQAQVWAPRYRQAAFGAFLTDKAEGELALDSAYLDVRQAFDAFLAATPPDAPIVLAGHSQGALHLMRLLKDRIAGTPLAGRVVAAYPIGWPISVEHDLPPLGLPACDKSDATGCIMTWSSFAEPAEPQLVLEAYRTRPALDGKAKDAKPVLCTNPLTGSIGGQAPASANLGTLKPSKDLKSGELIAKAVPARCDTSTGLLMIGDPPDLGPFVLPGNNYHVYDIPLFWANLRADVGRRTATWEKARGAAAR

SEQ ID NO: 337 - DNA, 1104 bp, Unknown
  Obtained from environmental sample
atgcaagtcagtggtgcaatggaagcaataaatcctgcgcagatgaatgcagcggaagtcacttcatcgcaggtatctgaccagatcatcggcggcgttagccaggtgccggaagcaggtttagctagtgaagtcggagcaatggcgatggcacctgctgctgaagatgcggcccttgccgccatggttgccggccctgccaatcaagccagttacggcaatttgcccagtgactggacggaagccgactataatcatgctctcgacatggccaagctgtcttcccaagcttatagccggttcaacgatatcaccgtcgatcttctgttggctccatttggtggtattggtgacataaaagcgcaggattttaccaccgataactggcgcctaatggacaccagtggcaagagtgactttttcttacccgtacagagcgggctggacttcactgtttttgaggcggtagccgatgacccggcagctaatgtgaaggaaggggatattgtgctcgcatttcgcggcagtgagcctacctccgcaccggattggatcaataatgtaaaacaggcggcgggtaattcctctcagtatgctcaggcggtagaagtcgcgaaggagctgcaagggcaggtagaccagtacaatgcagacaataacctgaccggcaatgatgccagaagcctccattttaccggccatagcctgggcgggggattggcaacagcggccgcgctggccacaggcagtagcgctaccgccttcaatgcagcgggccttggggattccaccctaaagaaccttgggctcaatgaagggctggcggcaggcttccacaataacgttaccaatattaatgtggaaggcgatctgttgagcgatgccaaccgccaaaaggatgtctataccacgggttcaggcatcctcgatgaaaccaggcagtatggggaacaggtttggctgcagggcgtcgatgataaggccagattgggcggaccgcttaatcccctgataccgggagtggctgatgacctggcaatccaggcactcaaccatgcctggcatgtgtatacctaccagttggaaaatcgcaacttcgcctaa

SEQ ID NO: 338 - protein, 367 aa, Unknown
  Obtained from environmental sample
MQVSGAMEAINPAQMNAAEVTSSQVSDQIIGGVSQVPEAGLASEVGAMAMAPAAEDAALAAMVAGPANQASYGNLPSDWTEADYNHALDMAKLSSQAYSRFNDITVDLLLAPFGGIGDIKAQDFTTDNWRLMDTSGKSDFFLPVQSGLDFTVFEAVADDPAANVKEGDIVLAFRGSEPTSAPDWINNVKQAAGNSSQYAQAVEVAKELQGQVDQYNADNNLTGNDARSLHFTGHSLGGGLATAAALATGSSATAFNAAGLGDSTLKNLGLNEGLAAGFHNNVTNINVEGDLLSDANRQKDVYTTGSGILDETRQYGEQVWLQGVDDKARLGGPLNPLIPGVADDLAIQALNHAWHVYTYQLENRNFA

SEQ ID NO: 339 - DNA, 1245 bp, Unknown; identical to SEQ ID NO: 7
  Obtained from environmental sample

SEQ ID NO: 340 - protein, 414 aa, Unknown; identical to SEQ ID NO: 8
  Obtained from environmental sample
  SIGNAL (1)...(30)

SEQ ID NO: 341 - DNA, 843 bp, Unknown
  Obtained from environmental sample
gtgcgtgaagggctggcctatctgaccgcgtcactggtcacgagcaagccaacactgccctggataggggatgcgatggtgccaggtggtgaatacaccgtaccggtacgtatctacgaccctgacccgacacaggccaaacctgtctgtctgtatctgcatggaggtgggcatctggctggcagcgtcagtgtctatgaccccatctgccgtaaactggccgcagccagcgggcagctggtcgtatctgtcgaatatcgtctggcacctgagtgtccctacccctgtgcactacaggatgccatcagtgttgtcagacatatccagccggtactgcaagagaagcagcgtctcatcacagatcaactcaatatcgctggcgattccggtggcggtgcactggccgcgtctgtctgtgccgccctgcaatccgaacagccacacccgatcaaccgtcagttgctgatctatcccaatctggattacacgctggagcatccatcggttgagcaactgagtgaaggctatctgctcgagaaagcccgtatcctctggtactacgagcagtattttcagcacaacgaggatcgtgtcgccgcctcccctctgcatatgcccatgaccgcacaactgccacccaccttcatcatcaccgccggttattgcccgttaaaggatgaggcagcagtttatctccaacgccttgatgcattgggggttcacactgggcatctggcgtttgataacctgctgcatgcctttctgaatatggaggatctggtaccggatgcctgtgcccaaagctatcaggcgatggctggattccttaaccgatcattctag

SEQ ID NO: 342 - protein, 280 aa, Unknown
  Obtained from environmental sample
MREGLAYLTASLVTSKPTLPWIGDAMVPGGEYTVPVRIYDPDPTQAKPVCLYLHGGGHLAGSVSVYDPICRKLAAASGQLVVSVEYRLAPECPYPCALQDAISVVRHIQPVLQEKQRLITDQLNIAGDSGGGALAASVCAALQSEQPHPINRQLLIYPNLDYTLEHPSVEQLSEGYLLEKARILWYYEQYFQHNEDRVAASPLHMPMTAQLPPTFIITAGYCPLKDEAAVYLQRLDALGVHTGHLAFDNLLHAFLNMEDLVPDACAQSYQAMAGFLNRSF

SEQ ID NO: 343 - DNA, 981 bp, Unknown
  Obtained from environmental sample
gtgcccgattccttcgtcatgaccactcgaagagtgcagggaggcaagttcgtcgccgaacccgggccgcctcgatatctgatcgtccccgaaggcgaattgccgaagccggagcatgagacaaacgtggcgctgtggatccgcaagctccgcaaagcagccacgtggggcaaggattcgcgcgatccgcgccgcgcgcgcggcgacatcctcttcttcgtccacggctataacaacgatcaccagttggtgctggccaggcaccggcgcctgaagacagacctcgccgccgccggcttccttggcgaggttgccaccttcgactggcccagcgccagcatgtccctcaattacatcgaggaccgccacgacgccaagcagaccgccatgctgctggtgacaggcggcatccgcctgctctccgaacggcaggagccggactgctccatcaacgtccaccttctcgggcactccacgggcgcctacgtgatccgcgaggccttcgacgatgccgacgatgcacggctcgccaacaacgcctggatggccagccaggtcgttttcatcggcgccgacgtctcctccggctccctcagccgcacgaatgccaggagcgaggcgctgtaccggcattgcgttcggctgaccaattactcgaaccgtttcgattccgtattgaagctttcgaacgtgaagcgcgccggcgtggcgccccgcgccggacgcgtcggcctgcctgcggacgcgccgccgaaagcggtggatgtggactgctccagctacttcgcactgctgcagggcgatccgcaagtgcaggccgaagaccaggcggaacggatcggcgcgttcgaccactcctggcacatcggcaaccgcatcttcgcccgggatctcttcgagaccctccgtggcgatctggaccgcaacaccctgccgactcgcgcgcagcgcgacggccgcctcgccctggtcagggcctga

SEQ ID NO: 344 - protein, 326 aa, Unknown
  Obtained from environmental sample
  DOMAIN (51)...(268): Protein of unknown function (DUF900)
MPDSFVMTTRRVQGGKFVAEPGPPRYLIVPEGELPKPEHETNVALWIRKLRKAATWGKDSRDPRRARGDILFFVHGYNNDHQLVLARHRRLKTDLAAAGFLGEVATFDWPSASMSLNYIEDRHDAKQTAMLLVTGGIRLLSERQEPDCSINVHLLGHSTGAYVIREAFDDADDARLANNAWMASQVVFIGADVSSGSLSRTNARSEALYRHCVRLTNYSNRFDSVLKLSNVKRAGVAPRAGRVGLPADAPPKAVDVDCSSYFALLQGDPQVQAEDQAERIGAFDHSWHIGNRIFARDLFETLRGDLDRNTLPTRAQRDGRLALVRA

SEQ ID NO: 345 - DNA, 1422 bp, Unknown
  Obtained from environmental sample
atgaaaaagaaattatgtacactggcttttgtaacagcaatatcttctatcgctatcacaattccaacagaagcacaagcttgtggaataggcgaagtaatgaaacaggagaaccaagagcacaaacgtgtgaagagatggtctgcggaacatccacatcatcctaatgaaagtacgcacttatggattgcgcgaaatgcaattcaaataatggcccgtaatcaagataagacggttcaagaaaatgaattacaatttttaaatactcctgaatataaggagttatttgaaagaggtctttatgatgctgattaccttgatgaatttaacgatggaggtacaggtacaatcggcattgatgggctaattaaaggagggtggaaatctcatttttacgatcccgatacgagaaagaactataaaggggaagaagaaccaacagctctctctcaaggagataaatattttaaattagcaggcgattactttaagaaagaggattggaaacaagctttctattatttaggtgttgcgacgcactacttcacagatgctactcagccaatgcatgctgctaattttacagccgtcgacacgagtgctttaaagtttcatagcgcttttgaaaattatgtgacgacaattcagacacagtatgaagtatctgatggtgagggcgtatataatttagtgaattctaatgatccaaaacagtggatccatgaaacagcgagactcgcaaaagtggaaatcgggaacattaccaatgacgagattaaatctcactataataaaggaaacaatgctctttggcaacaagaagttatgccagctgtccagaggagtttagagaacgcacaaagaaacacggcgggatttattcatttatggtttaaaacatttgttggcaatactgccgctgaagaaattgaaaatactgtagtgaaagattctaaaggagaagcaatacaagataataaaaaatacttcgtagtgccaagtgagtttctaaatagaggtttgacctttgaagtatatgcaaggaatgactatgcactattatctaattacgtagatgatagtaaagttcatggtacgccagttcagtttgtatttgataaagataataacggtatccttcatcgaggagaaagtatactgctgaaaatgacgcaatctaactatgataattacgtatttctaaactactctaacttgacaaactgggtacatcttgcgcaacaaaaaacaaatactgcacagtttaaagtgtatccaaatccgaataacccatctgaatattacctatatacagatggatacccagtaaattatcaagaaaatggtaacggaaagagctggattgtgttaggaaagaaaacagatacaccaaaagcttggaaatttatacaggctgaatag

SEQ ID NO: 346 - protein, 473 aa, Unknown
  Obtained from environmental sample
  SIGNAL (1)...(27)
  DOMAIN (1)...(303): Zinc dependent phospholipase C
MKKKLCTLAFVTAISSIAITIPTEAQACGIGEVMKQENQEHKRVKRWSAEHPHHPNESTHLWIARNAIQIMARNQDKTVQENELQFLNTPEYKELFERGLYDADYLDEFNDGGTGTIGIDGLIKGGWKSHFYDPDTRKNYKGEEEPTALSQGDKYFKLAGDYFKKEDWKQAFYYLGVATHYFTDATQPMHAANFTAVDTSALKFHSAFENYVTTIQTQYEVSDGEGVYNLVNSNDPKQWIHETARLAKVEIGNITNDEIKSHYNKGNNALWQQEVMPAVQRSLENAQRNTAGFIHLWFKTFVGNTAAEEIENTVVKDSKGEAIQDNKKYFVVPSEFLNRGLTFEVYARNDYALLSNYVDDSKVHGTPVQFVFDKDNNGILHRGESILLKMTQSNYDNYVFLNYSNLTNWVHLAQQKTNTAQFKVYPNPNNPSEYYLYTDGYPVNYQENGNGKSWIVLGKKTDTPKAWKFIQAE

SEQ ID NO: 347 - DNA, 963 bp, Unknown
  Obtained from environmental sample
gtgattactttgataaaaaaatgtttattagtattgacgatgactctattgttaggggttttcgtaccgctgcagccatcacatgctactgaaaattatccaaatgattttaaactgttgcaacataatgtatttttattgcctgaatcagtttcttattggggtcaggacgagcgtgcagattatatgagtaatgcagattacttcaagggacatgatgctctgctcttaaatgagctttttgacaatggaaattcgaacatgctgctaatgaacttatccacggaatatccatatcaaactccagtgcttggccgttcgatgagtggatgggatgaaactagaggaagctattctaattttgtacccgaagatggcggtgtagcaattatcagtaaatggccaatcgtggagaaaatacagcatgtttacgcgaatggttgcggtgcagactattatgcaaataaaggatttgtttatgcaaaagtacaaaaaggggataaattctatcatcttatcagcactcatgctcaagccgaagatactgggtgtgatcagggtgaaggagcagaaattcgtcattcacagtttcaagaaatcaacgactttattaaaaataaaaacattccgaaagatgaagtagtatttattggtggtgactttaatgtgatgaagagtgacacaacagagtacaatagcatgttatcaacattaaatgtcaatgcgcctaccgaatatttagggcatagctctacttgggacccagaaacgaacagcattacaggttacaattaccctgattatgcgccacagcatttagattatatttttgtggaaaaagatcataaacaaccaagttcatgggtaaatgaaacgattactccgaagtctccaacttggaaggcaatctatgagtataatgattattccgatcactatcctgttaaagcatacgtaaaataa

SEQ ID NO: 348 - protein, 320 aa, Unknown
  Obtained from environmental sample
  SIGNAL (1)...(29)
  DOMAIN (37)...(319): Endonuclease/Exonuclease/phosphatase family
MITLIKKCLLVLTMTLLLGVFVPLQPSHATENYPNDFKLLQHNVFLLPESVSYWGQDERADYMSNADYFKGHDALLLNELFDNGNSNMLLMNLSTEYPYQTPVLGRSMSGWDETRGSYSNFVPEDGGVAIISKWPIVEKIQHVYANGCGADYYANKGFVYAKVQKGDKFYHLISTHAQAEDTGCDQGEGAEIRHSQFQEINDFIKNKNIPKDEVVFIGGDFNVMKSDTTEYNSMLSTLNVNAPTEYLGHSSTWDPETNSITGYNYPDYAPQHLDYIFVEKDHKQPSSWVNETITPKSPTWKAIYEYNDYSDHYPVKAYVK

SEQ ID NO: 349 - DNA, 579 bp, Unknown
  Obtained from environmental sample
gtgagccacctgctgtacctgcacggctttcgctcgtcgccgcgctcgaccaaggcgcagatggtcgccgagcgcgtcgcgcgcgaccacccacgcgtgacctggtgctgcccccagttgccgccctcacccgcagcggcctgggccttgatcgagcgcaccgtggcagactggccccggggcgcgatgggcgtcatcggctcatcgctgggtggcttttacgccacccggctggcggcgctgaccggctgccgcgcggtgctgctcaacccggcggtggacccggcgcgcgacttggcgcgccacatcggcgagcacaccgcgtggcacgacccgcaggagcgctttttctttcggcccgagtacgtgcaggagctgcgcgcgctggcggtgggcgccctgcccgacccggcgcgcgtgctgctggtggccgccaccggcgacgaagtgttggactggcgcgagatggtggcgcgctaccccggcagcccgcagcgcatcgtgcccggcagcgatcacgcgctgtcggacttcgccgcgcacctggacgcggtgctggcgcacctgaacctggtttga

SEQ ID NO: 350 - protein, 192 aa, Unknown
  Obtained from environmental sample
  DOMAIN (3)...(190): Uncharacterised protein family (UPF0227)
MSHLLYLHGFRSSPRSTKAQMVAERVARDHPRVTWCCPQLPPSPAAAWALIERTVADWPRGAMGVIGSSLGGFYATRLAALTGCRAVLLNPAVDPARDLARHIGEHTAWHDPQERFFFRPEYVQELRALAVGALPDPARVLLVAATGDEVLDWREMVARYPGSPQRIVPGSDHALSDFAAHLDAVLAHLNLV

SEQ ID NO: 351 - DNA, 1788 bp, Unknown
  Obtained from environmental sample
gtggctaggcaagccagagccgacgtggtgaccatcggggcagggtggagcgccgccatcctcgcctggaagctcaccgaggcgggctacaaggtggtttccatcgagcaggggccgatgcgctacacctatcccgactttgcccacaaccacgacgcgcttcgctaccaaaaccgcttcgcgctcatgcacaacctcgcccgggagagctggacctggcgccctaatgcgcgggcgccggccttgcccatgcgccgctacggcgcctttcatcccggccagggctttggcggcgcgggcgtgcactggtcggcgatgcactaccgcttcatgcccgaggactttcgctaccgcagccaccatatcgagcgctacggcgcggacaagctgcccgagggcaatgccatccaggactggcctctaagctacgaggagctcgagccctattacgctcagttcgactgggacctcggggtgtcgggccaggtgggcaacctgcgcggcgagcctcaagagggcggcaatcccttcgagggctttcactcgcggccctacccgctgcccccgctcaccaccaacatccccgcggagatgttcaaggaggcctgccgcgagcttggctaccatcccttccccaacccctcgggcatccactcgcaggcctataccgaccgcttcggcaacgtccgggccggctgccagtactgcggcttttgcacccgctacggctgccacgtcgatgccaaggcgagcggccacaacgtccacgcgccggtggcgttaagaacgggcctttgggacatccgcccacatgccaaggcaacgcgcatcaacaccggccagggcggcctcgccaccggcgtctcctatatcgaccttgccagcggcgaggagcacgagcaacccgccgaggtcgtcatcagcacgggctacaccatgacgaacgtgcgcacgctgatgctctctagaagcagcgcgcacccgagcggcatcggcagcgaccgcggccagctcggcaggaactttacctatcaggtctggcaagctccggccacgggcgtcttcgagggccgccgcttcaacctcttcatgggcaacacctcgacgcaaaacaccatctacgacttctacggcgacaacttcgaccacgcggatctggacttcatgggcgggggcggcatctactgcaccccaggcgagcgcgagcccgtcggcgcggcgggcgccgcgccctttggcgaggcgggcgacggcgagggccccacgagaggctggggccgggagtggaaggagatgttcaagatgagttgggactcctttgcgcctattctcttccagggcgagagcatggcctaccaggaccatcgtttcgacttagaccccaactaccgcgactcgttcggcctgcccctcttgcgctttaccttcgacttcaaggagaacgaaaagaacatgtaccgcttcatcgcgcggcgggtgatcgagatcatggagcggatgaacccctcttggatgcagaccgaggaggagctggagcccttcaacatccacgactaccagagcacccacatcaacggcggcgccatcatgggcacggaccccggcaactcggtcaccaaccgctatggccaggtctgggacacacccaacgtctttgtcaccggcgcggcgctctacccgcaaaaccccggcgccaacccctcggccaccatgggcgcgctcgcctacctggcgggcgaggcgctggtcgagcgctactttagaaatcctcgagagcttctcgtctaa

SEQ ID NO: 352 - protein, 595 aa, Unknown
  Obtained from environmental sample
MARQARADVVTIGAGWSAAILAWKLTEAGYKVVSIEQGPMRYTYPDFAHNHDALRYQNRFALMHNLARESWTWRPNARAPALPMRRYGAFHPGQGFGGAGVHWSAMHYRFMPEDFRYRSHHIERYGADKLPEGNAIQDWPLSYEELEPYYAQFDWDLGVSGQVGNLRGEPQEGGNPFEGFHSRPYPLPPLTTNIPAEMFKEACRELGYHPFPNPSGIHSQAYTDRFGNVRAGCQYCGFCTRYGCHVDAKASGHNVHAPVALRTGLWDIRPHAKATRINTGQGGLATGVSYIDLASGEEHEQPAEVVISTGYTMTNVRTLMLSRSSAHPSGIGSDRGQLGRNFTYQVWQAPATGVFEGRRFNLFMGNTSTQNTIYDFYGDNFDHADLDFMGGGGIYCTPGEREPVGAAGAAPFGEAGDGEGPTRGWGREWKEMFKMSWDSFAPILFQGESMAYQDHRFDLDPNYRDSFGLPLLRFTFDFKENEKNMYRFIARRVIEIMERMNPSWMQTEEELEPFNIHDYQSTHINGGAIMGTDPGNSVTNRYGQVWDTPNVFVTGAALYPQNPGANPSATMGALAYLAGEALVERYFRNPRELLV

SEQ ID NO: 353 - DNA, 1728 bp, Unknown
  Obtained from environmental sample
atgggggatatgacattcgcgatgcgtcgtcacgggacgcgatttgccgcagcgggcttgcttctgctgctgctgggcggcctgctggcttcccttatccagacgtcgaacggcattcgagtcatggacgtccgcttcgcgggaagcgacggcaccgcaatgagcgcgctgctctacgtaccaccgaccgcgagcgcaaaagcgcccgcgcctggaatcctcgccgttcatgggtacttcaattcgcgcgaggcccagagcggctttgccattgagtttgcgcgacgcggatacgtcgtgttggcactagatcaaaccggccacggttacagcgatccacctgcgttctcgaacggcttcggcgggcccgatgggctggcctacttgcgcagcctggatttcgtggacaagaacaacatcggtttggaaggtcacagcatgggcggatggaccgttctgaatgccgccgccgcttttcctgatggctacaaatccgtggtcctcgaaggttccagcactggagcaccgttcgcgcccgagggttccacggcgtttccgcgcaatctcgccgtggtatttgcacagttcgatgagttctcggcattcatgtggggagcgccaatcgcgcgggaagttgcccagagccagaagctgcagacaacattcggagtgaacgaggcggtgcagcccgggcgggtttatggctcgatcgaggagggcaatgcgcggatcctgcatacgccagcaggcactcacccgttcaatcacctttccacgcaggccataggccacagcatcgattggtttcagcgcactttggacggcggcacggccattgatcccgacgaccagatatggccctggaaggagctcggcaccaccctcgcgttcgtcggctgcatcatcctgatgctcggcgtgttcgagtgggcgctgggcactgcctatttcgcacccctggcgaaggaatccgcacccgccactacacggggcggagtggcttggtggcttgcgctctccctcagcatcacgctgccggtactcacgttttttactttcctgcagctcggcgaacgcctcgctcctgcatcggtcgtatggccgcagggcttcagcaaccaaatcgtcttgtgggctctgctcaatgcgctgctcttcgcagggctgtcacttttgcccggcaatccgcgacggactttcgactcccgcccgtggcgatcgttcgtgctggcgttcctcacggtcgccagcgcctatgcagcactcgcggtcgctgacttcctgtttacaatagatttccgcttctggttcatcgcgctcaagctgttgagccgcgatcaggcgatctcgttcctcgcctatctggtacctttcgccgctttcttcttggtcatattgcgcggcttacacaccaacctgccgcttaagaatgcctcgccagggttgcaatacgccatcaacatcgcggcgcttgccggtggattcgcgttgttcgtgctcgttcagtacggccttctattcagcaccggccggctgctgacgttctacatgaatgacaatttgcgaaccatcatagccatccaattcatacccctgatggcgattgtcgcggtcatttcgacgttcgcgtttcgacgcaccgacagctacgtgccgggcgccatcgtctgcgccctgttcgttacatggtatgtggtggccggacaagcaacgcacgtggctagatga

SEQ ID NO: 354 - protein, 575 aa, Unknown
  Obtained from environmental sample
MGDMTFAMRRHGTRFAAAGLLLLLLGGLLASLIQTSNGIRVMDVRFAGSDGTAMSALLYVPPTASAKAPAPGILAVHGYFNSREAQSGFAIEFARRGYVVLALDQTGHGYSDPPAFSNGFGGPDGLAYLRSLDFVDKNNIGLEGHSMGGWTVLNAAAAFPDGYKSVVLEGSSTGAPFAPEGSTAFPRNLAVVFAQFDEFSAFMWGAPIAREVAQSQKLQTTFGVNEAVQPGRVYGSIEEGNARILHTPAGTHPFNHLSTQAIGHSIDWFQRTLDGGTAIDPDDQIWPWKELGTTLAFVGCIILMLGVFEWALGTAYFAPLAKESAPATTRGGVAWWLALSLSITLPVLTFFTFLQLGERLAPASVVWPQGFSNQIVLWALLNALLFAGLSLLPGNPRRTFDSRPWRSFVLAFLTVASAYAALAVADFLFTIDFRFWFIALKLLSRDQAISFLAYLVPFAAFFLVILRGLHTNLPLKNASPGLQYAINIAALAGGFALFVLVQYGLLFSTGRLLTFYMNDNLRTIIAIQFIPLMAIVAVISTFAFRRTDSYVPGAIVCALFVTWYVVAGQATHVAR

SEQ ID NO: 355 - DNA, 987 bp, Unknown
  Obtained from environmental sample
atgaacaatagcatcacaggaaaagatgggcagcggtctgctgcgaccgggttggtttggctgcagcaggttcggcagactttattgctcgccctgtgcttgttgacagtacatgcaacagcacaagccaacgaccaaatgacgccgatcacaacacctgagcagacacttgcaatagaacttggcaccccgccacttcctgctccggagtccggcgctttggcgcaggaatcctggcatgcgcaatatggcagtcgctttgcgcggaatgtcacagtagccacactgaccccattcctgcctgaaccgggtaaagccagtggtgccgcggtgatcgtcgcacccggtggtggctttcgcaccttatcgatggacaacgaaggctgggatgtcgcccgcaatctggccaagcagggcataaccgcttttgtgctgaaataccggttaaatcaaacaccggccgacatggctgattttaaacgttcgatggacgagatgttttcgcgccgtccgccccggccagatccggcacagatgttggtgcaactggcaccgcagcttgaagacgcccacgccgcttttgcgctgatacgtagtcgcgctggcgaatggcatatcgatccggaccggattggcatgattggattttctgccggcgccatgctgacgatggcaaccactttggccggcaaggacgccaaaccggcttttatcgccaatatctacggccccctggatgcggttgtggtcccggctgatgcaccaccactctttgtggcgctggcggctgacgatccattttttgcccatggtaaattcggtctgatcgagagttggcacgccgcgaaaaagccggtcgagtttcatttctatgagcaagggggtcacggctttggcatgtacccgaaggacaccaccagtaccaactggtttaatgcgttcgccagctggctagccatgcacgggatgctcaaacctaaagcgtga

SEQ ID NO: 356 - protein, 328 aa, Unknown
  Obtained from environmental sample
  SIGNAL (1)...(43)
MNNSITGKDGQRSAATGLVWLQQVRQTLLLALCLLTVHATAQANDQMTPITTPEQTLAIELGTPPLPAPESGALAQESWHAQYGSRFARNVTVATLTPFLPEPGKASGAAVIVAPGGGFRTLSMDNEGWDVARNLAKQGITAFVLKYRLNQTPADMADFKRSMDEMFSRRPPRPDPAQMLVQLAPQLEDAHAAFALIRSRAGEWHIDPDRIGMIGFSAGAMLTMATTLAGKDAKPAFIANIYGPLDAVVVPADAPPLFVALAADDPFFAHGKFGLIESWHAAKKPVEFHFYEQGGHGFGMYPKDTTSTNWFNAFASWLAMHGMLKPKA

SEQ ID NO: 357 - DNA, 849 bp, Unknown
  Obtained from environmental sample
atgaaaaagaaagtattagcactagcagctatggttgctttagctgcaccagttcaaagtgtagtgtttgcgcaaacaaataatagtgaaagtcctgcaccgatcttaagatggtcagctgaggacaagcataatgagggagttagtactcatttgtggattgtaaatcgtgcaattgacatcatgtctcgtaatacagcgattgtgaagccaaatgaaactgctttattaaatgagtggcgtactgatttagaaaatggtatttattctgctgattacgagaatccttattatgataatagtacatatgcttctcatttttacgatccggatactggaaaaacatatattccttttgcgaaacaggcaaaagaaacaggtacaaaatattttaaacttgctggtgaagcatacaaaaatcaagatatgaaacaggcattcttctatttaggattatcacttcattatttaggagatgtaaatcagccaatgcatgcagcaaactttacgaatctttcttatccaatgggtttccattctaaatatgaaaattttgttgatacaataaaaaataactatatagtttcagatagtagtggatattggaattggaaaggggcaaacccagaagattggattcaaggagcagcagtagcggctaaacaagattatcctggtattgtgaacgatacgacaaaagattggtttgtaaaagcagctgtatctcaagcatatgcagataaatggcgtgcagaagtaacaccggtgacaggaaaacgcttaatggaggcacagcgcgttacagctggttatattcatttatggtttgatacgtatgtaaatcactaa

SEQ ID NO: 358 - protein, 282 aa, Unknown
  Obtained from environmental sample
  SIGNAL (1)...(24)
  DOMAIN (1)...(281): Zinc dependent phospholipase C
MKKKVLALAAMVALAAPVQSVVFAQTNNSESPAPILRWSAEDKHNEGVSTHLWIVNRAIDIMSRNTAIVKPNETALLNEWRTDLENGIYSADYENPYYDNSTYASHFYDPDTGKTYIPFAKQAKETGTKYFKLAGEAYKNQDMKQAFFYLGLSLHYLGDVNQPMHAANFTNLSYPMGFHSKYENFVDTIKNNYIVSDSSGYWNWKGANPEDWIQGAAVAAKQDYPGIVNDTTKDWFVKAAVSQAYADKWRAEVTPVTGKRLMEAQRVTAGYIHLWFDTYVNH

SEQ ID NO: 359 - DNA, 1197 bp, Unknown
  Obtained from environmental sample
atgaactggcagcgttattcgaccggtgtggcggccctcgccttctggtctttttgcagtcaaccgctctcggcccagcaggccgccaagccgctggcggtggcggcccccgccgacgccggcatggaccccgccgtgctcggccagatcgccgagcgcatgaaggagttcgtcgagaagcggcaggcctccggcgtggtcacgctggtcgccagggacggcaagatcgtgcaacacgaggcggtcggttatgccgacctggaccagcagaggccgatggccagggactcgctcttcgccatcgccagcatgaccaagccgatcgccaccaccgccctgatgatcctggtggatgagaagaaggcggcgctcgacgacccggtggcgaagtacctccccgagttcaaggacgtgaagctgaaggacggcacgagtccgaagcaggcgatcctggtgcggcacctgctgacgcacacggctggcctggccggcagtcagcagaacgtcggtacgctcaaggagacggccgcggcggtcgcccagcggccgctcgaattcgagccgggcagccgctggcagtacagcccgggcatcagcgtggcgggccgggtcgtcgaggcggcctcgggccagccgttcgacgagttcctggccagccggatcttccgcccgctgggcatggttgacaccaccttccgacctagcccggagcagcagaagcggctggcccgcctctaccagccgaccaaggacaagcaaggcatcgaagcgaccgaccactggctcctccaggagaccaacccgaacccctcgggcggcttgttctcgaccgccggcgacctggcccgtttctaccagatgatcctcaacggcggcgagctcgacggccagcggatcgtctccccgcaagcggtcgccgagatgacccggctccagactggcgagcttgccaccggcttcacgcccggcaacggctgggggctcggcttctgcctggtgcggaagccgcagggggtgacgcagtcgctgtcgccgggcagcttcggccatggcggggccttcggcacgcagggctggctcgaccccaagcggcggatgttcttcgtgctgctgatccagcgcaccggcttcggcaacagcgacgcctccgagttgcgcggggctctgcaggacctggcggtgcaggccatccaatag

SEQ ID NO: 360 - protein, 398 aa, Unknown
  Obtained from environmental sample
  SIGNAL (1)...(25)
  DOMAIN (50)...(393): Beta-lactamase
MNWQRYSTGVAALAFWSFCSQPLSAQQAAKPLAVAAPADAGMDPAVLGQIAERMKEFVEKRQASGVVTLVARDGKIVQHEAVGYADLDQQRPMARDSLFAIASMTKPIATTALMILVDEKKAALDDPVAKYLPEFKDVKLKDGTSPKQAILVRHLLTHTAGLAGSQQNVGTLKETAAAVAQRPLEFEPGSRWQYSPGISVAGRVVEAASGQPFDEFLASRIFRPLGMVDTTFRPSPEQQKRLARLYQPTKDKQGIEATDHWLLQETNPNPSGGLFSTAGDLARFYQMILNGGELDGQRIVSPQAVAEMTRLQTGELATGFTPGNGWGLGFCLVRKPQGVTQSLSPGSFGHGGAFGTQGWLDPKRRMFFVLLIQRTGFGNSDASELRGALQDLAVQAIQ

SEQ ID NO: 361 - DNA, 1200 bp, Bacteria
atgaaacgtaaatttactaaaacggtacttaatgcagtttttgtcttagggttatgctctattatggggggaacatcttatgcttgggatggaaaaaaagacggaactggaacacatgcacttattgcagaacatggattaactatgttaaataatgatttaaatcaaaatgaaccaaagccaataaaacaaaacatagaaatattaaacaaatatttgaaagacttaaaattaggatcaactttcccagactatgaccctaatgcatatgatttatttcaagaccatttctttgacccagatacaggtaacaactttacattagataataaatggtatgtagcatctcctatttatgatacagctgaaacacaagtaagaaaatttgctactttagctgaaaatgaatggaaaaaaggaaattataaagaagctacatttttattaggtcaaggaatgcattatttaggggatttaaatacaccataccatgcagctaatgtaactgcagtagatagtccaggtcatgtaaagtatgaaacatttgtagaaaacagaaaagagaattatgctttaaatacagctggaaatgatacaactcaaggaatatataaagatgcagtagctaataaggattttgatcaatggatgactcaaaactctgtaaaatatgctaaaaaggcaaaagctttatattacagccattcaactatgaaacataattgggatgattgggattattcaggaagagaagcgataaaaaattctcaagtatgtacagcaggatttttatatagatttataaatgaggtttcagaagatcaaatttcaggaaacaatttaacaaatgaatttaatgtagttttaaaaactgcagacaatgaatatgcaggaactgacgataatgtatattttggatttgaaactaaagatggaagtaagtatgaatggaatttagataatgcaggaaatgattttgaaaaaaatcaaacagataattatatactaaaagtgaagaatgatgtaaaagttaacacaaatgatataacaaaatattgggttagaaaagaaaatagaacaccaataagtgacgattgggaattaagtaatataaaattaatatcaaatggaaaagtaattcttcaaaaagatattaataaggtattttcaggtaatcaagtttatgatataaacaaataa

SEQ ID NO: 362 - protein, 399 aa, Bacteria
  SIGNAL (1)...(28)
  DOMAIN (283)...(399): PLAT/LH2 domain
  DOMAIN (1)...(278): Zinc dependent phospholipase C
MKRKFTKTVLNAVFVLGLCSIMGGTSYAWDGKKDGTGTHALIAEHGLTMLNNDLNQNEPKPIKQNIEILNKYLKDLKLGSTFPDYDPNAYDLFQDHFFDPDTGNNFTLDNKWYVASPIYDTAETQVRKFATLAENEWKKGNYKEATFLLGQGMHYLGDLNTPYHAANVTAVDSPGHVKYETFVENRKENYALNTAGNDTTQGIYKDAVANKDFDQWMTQNSVKYAKKAKALYYSHSTMKHNWDDWDYSGREAIKNSQVCTAGFLYRFINEVSEDQISGNNLTNEFNVVLKTADNEYAGTDDNVYFGFETKDGSKYEWNLDNAGNDFEKNQTDNYILKVKNDVKVNTNDITKYWVRKENRTPISDDWELSNIKLISNGKVILQKDINKVFSGNQVYDINK

SEQ ID NO: 363 - DNA, 1443 bp, Unknown
  Obtained from environmental sample
gtggcgctcctgcagcggacgcgaagcgggatggcgcagcaggcggtcgatggagggcaggcgaatggcggtcatgggagcctcttgggtcgagtcgacccccagtgtagcccgaaccggcggcgggtcgaccagggcgcgccgggctgctgcaggcctggtctactccgcgacgaaggggccgggcccggacctcggtcgtctgaaaatgacccccgggttcccggtttgccgcgtgccagagcccgtcctaggatggtttcgcaggctcttcccaggcagctgccacggtcctggcgtggagagccctggccaccacgtccacctcacgacaataacaaaggtgccgtcatgtccaagaaatcctccctctgggccagcgatggcctgctcgacaacagcgacatcgtcagcctcggcaacttcacctacctgcacacgctgaagagcgccgcagccacgccactggcgcagacccactcggccagcacccccaccgtcagcgaattcctcaacggcgccatcagcgaatacgtactcaatggcacgcctgacggcatgcggcccttcctgatggatggccaccaaatgacgctgcacaactcgctcaatggcgccacggcccacacctggatcaccgccgagaatcagctgctcatcacctatgccggcactaccagaggcgagaatctgctgatcgaccccctttccaccgccggtggcctgctgagcgatctgcagatcctcagccagcaggtctccagcgcccagcgccaatcgctggacttcgcccaccaggtgatcgaggcggcggccaagcagggctacggcacccaggacatctttgtcaccggccactccctggggggcatctcggcggcctacgtcgcccagcagaccggtctcggcggcatcagcttcgaggcctcgggcattccccgcgatggtcaggcggcgggccacggcggcaatttcgtcaatgtggtcaccctcggcgatccggtggccaactacagctccgacatccgcggcgaacagcccttcgcccccagcttcgtcagccaggccgagggtggcggcagcctgccccactatggctcgctgttcctgatcggtgcccaggccgaccagcacgacctgagccaggcggcggccaaggtcggccacctgttcaacggcgacaacggcggccaggtcaatccactgggggcggccctgcatccgctcagcgtcgccgccgggatcgccgaagcggcgcgcctgatcgccgaattccatctgccggccgccgaatacaccaacctcggcgtgacccctaccggcggctttctcgacaccctgccggcgcagatcggcacggcccatggtccggtgctgatggtcggcaactacagcgtggcggaattgcaggcctttgccgagacccacgccaccttcggctga

SEQ ID NO: 364 - protein, 480 aa, Unknown
  Obtained from environmental sample
MALLQRTRSGMAQQAVDGGQANGGHGSLLGRVDPQCSPNRRRVDQGAPGCCRPGLLRDEGAGPGPRSSENDPRVPGLPRARARPRMVSQALPRQLPRSWRGEPWPPRPPHDNNKGAVMSKKSSLWASDGLLDNSDIVSLGNFTYLHTLKSAAATPLAQTHSASTPTVSEFLNGAISEYVLNGTPDGMRPFLMDGHQMTLHNSLNGATAHTWITAENQLLITYAGTTRGENLLIDPLSTAGGLLSDLQILSQQVSSAQRQSLDFAHQVIEAAAKQGYGTQDIFVTGHSLGGISAAYVAQQTGLGGISFEASGIPRDGQAAGHGGNFVNVVTLGDPVANYSSDIRGEQPFAPSFVSQAEGGGSLPHYGSLFLIGAQADQHDLSQAAAKVGHLFNGDNGGQVNPLGAALHPLSVAAGIAEAARLIAEFHLPAAEYTNLGVTPTGGFLDTLPAQIGTAHGPVLMVGNYSVAELQAFAETHATFG

SEQ ID NO: 365 - DNA, 609 bp, Unknown
  Obtained from environmental sample
atgatccgaattgaccaccgcaaaacgctcaaacatctctatcacccctcccacaagacacctgccctggtggaaatccccctcatgaacttcctgatgatggacgggcgcggcaaaccggatgggaaaccgttcccgcaagccgccagcgccctcttcccgctggcctacaccctcaagtggatggtgcgcctgggaagcgatatcgacttccacgttatgccaatggaggtacgctggagggtcaaccgcgagaagaaggaattcgcctggacgatgatgctgatgcaacccgaatacatcaccacagaattggtgaatgaagcccggcaaaaagtgttggccaaggtggtggacggttccctgctcgatcaggtgcgttttgaatcgtttgccgaggggctgtgcgtccagttcctgcatatcggcgcctacgagggcatggatgccgctctggagaatatgctggcagttgccgatgctcaaggctacagcgtccccacccgcaatgcccacgatatctacttgaacgatgtccggaaaacaaaaagtgagaatctaaaaaccattatgcgcctgccggttctccggcaggcaggtataaattga

SEQ ID NO: 366 - protein, 202 aa, Unknown
  Obtained from environmental sample
MIRIDHRKTLKHLYHPSHKTPALVEIPLMNFLMMDGRGKPDGKPFPQAASALFPLAYTLKWMVRLGSDIDFHVMPMEVRWRVNREKKEFAWTMMLMQPEYITTELVNEARQKVLAKVVDGSLLDQVRFESFAEGLCVQFLHIGAYEGMDAALENMLAVADAQGYSVPTRNAHDIYLNDVRKTKSENLKTIMRLPVLRQAGIN

SEQ ID NO: 367 - DNA, 1425 bp, Unknown; identical to SEQ ID NO: 35
  Obtained from environmental sample

SEQ ID NO: 368 - protein, 474 aa, Unknown; identical to SEQ ID NO: 36
  Obtained from environmental sample
  DOMAIN (133)...(265): Lipase (class 3)

SEQ ID NO: 369 - DNA, 789 bp, Unknown
  Obtained from environmental sample
atgaagtcgctattgccattgagcatcatcctggctggtctgtcgaccggctgcgcgctggagaacctcgagtccgacgagaacgagctcgccggcgccaactacgtcgcgatgggcgactcgtatgcttctggaaccgggacccgcgagtactaccattcggggtgtcagcggtcgaaccattcgtatgcgaagcagctcgccgccgcgagggggttgaacctctctcacgtcgcgtgctcgggggcgcgcatcccggacgtccgcgccaaccagctcggcgcgctctcggcctcgacgaacctcgtgacgatctcgatcggcggcaacgacgccgggttctcgagcgtgatcacccagtgcgcgaagccctggccgtatacgtgcaccaccgagatcaacaacgcgcggaacttcatcaacaacaccctccccggccagctcaatgcgctctacaccgagatcgacacgcgggccccgaatgcccaggtcatcgtcgtcggctatccgcggctgttcaacggcgaggagtgcaacctcctggcgcgtatcagccccaccgagcagagcgatctcaacgccgtcgccgacctgctcgcgaccaagatctcggcggccgcggctgcccgtggcttcgacttcgtggatgcgcgcggcccgttccagccccaccgcatctgcgatgacgtcgagtggctgaatggcctgtccaatccagtcggcgagtcgtatcacccgaacaagatcggccacgacgcgttcaccgatctcatcaatgcgaggctgtaa

SEQ ID NO: 370 - protein, 262 aa, Unknown
  Obtained from environmental sample
  DOMAIN (35)...(258): GDSL-like Lipase/Acylhydrolase
MKSLLPLSIILAGLSTGCALENLESDENELAGANYVAMGDSYASGTGTREYYHSGCQRSNHSYAKQLAAARGLNLSHVACSGARIPDVRANQLGALSASTNLVTISIGGNDAGFSSVITQCAKPWPYTCTTEINNARNFINNTLPGQLNALYTEIDTRAPNAQVIVVGYPRLFNGEECNLLARISPTEQSDLNAVADLLATKISAAAAARGFDFVDARGPFQPHRICDDVEWLNGLSNPVGESYHPNKIGHDAFTDLINARL

SEQ ID NO: 371 - DNA, 1509 bp, Unknown
  Obtained from environmental sample
atggtcaatcccagtattccactgattgaaacggtacagggccagttgatgggtgtcgtacaggatgacatccatctctggcgcggtattccttacgccgcaccgccgacgggagaacgtcgctggcgagcgccgcaaccggtcactccctggtcagggattcgtaatgcgaataccttctccagcgccagctggcaggacattgagtactgcaaagagttgggcggcggcgatcccggcgcattttctgaagattgtctctatctcaacgtctggtctccggcggagcgacatcagccgcttccggtgatggtctggctgcacggtggcggctacaccattggtgccggcaatctgccgccttatgacggcgttgcgctggcgaagcgtaacgtggttgtcgttaccgtcaactatcgcctcggtcatcttggcttttttgcccatccggcgctggaaggcgaagagggtgaggctctcaataactttgctttgctcgaccagattgctgcgctgcgctgggtacaggaaaacattgccgcgtttggcggcgatccgcaaaacgtcacgctgtttggtgaatcggccggggcgcgcagcgtgctctcgctgttagcttcgccgcgaggaaaagggctgtttcataaagcgattgtccagagcggctacacgttgccggacacgcctcgtgaaatagcgctggaaaacggcattgcgctggctgaacattttggcttgcagaatgcgacggcggaacagctacgtgcgattccggccgaggccttctggccgctgggcgcaccgtacaaaattgcgccgacacctatctccggcgatgcggtactgccggagccaatgctggacgtctttttcgccgccagacagcacccgatgcccgttatgattggttctaacagcgatgaagccagcgtgatggccgtcttcggcgtcgatcttgccggacaaattcagaaactgcgtcgtgaacgcaggctgggactcggcctgattaagctgctgtatccgggcgtgaagggcgatgaagaactggggcgacaggtgtgtcgggatatggcgtttacggcattaggttatgtggtgatgcaggcgcaacagcgggtcggcgagccgtgctggcgttactggttcgattacgttgcggaatcggagcatcacacctatgccaacggcgcctggcatggcaacgaagtgccttacgtctttaataccttaacgctcgctgaaccttcgcgaaattatgtgaacgaaaacgatctcgccttcgctgtccacgttgcggattactgggtcaattttgcccgtcatgccagtcggacctgcgatgttctgcatggaccggtccgctggcctgcctgtattcagggccgcgatcgggtgttacgtattgggctgaaaaagtttgccggttttaaggtcgagaaccggtttatgcgggcgcgactttcgctctttaaacgggtgatgacccagcacgtcagtctcgattag

SEQ ID NO: 372 - protein, 502 aa, Unknown
  Obtained from environmental sample
  DOMAIN (2)...(482): Carboxylesterase
MVNPSIPLIETVQGQLMGVVQDDIHLWRGIPYAAPPTGERRWRAPQPVTPWSGIRNANTFSSASWQDIEYCKELGGGDPGAFSEDCLYLNVWSPAERHQPLPVMVWLHGGGYTIGAGNLPPYDGVALAKRNVVVVTVNYRLGHLGFFAHPALEGEEGEALNNFALLDQIAALRWVQENIAAFGGDPQNVTLFGESAGARSVLSLLASPRGKGLFHKAIVQSGYTLPDTPREIALENGIALAEHFGLQNATAEQLRAIPAEAFWPLGAPYKIAPTPISGDAVLPEPMLDVFFAARQHPMPVMIGSNSDEASVMAVFGVDLAGQIQKLRRERRLGLGLIKLLYPGVKGDEELGRQVCRDMAFTALGYVVMQAQQRVGEPCWRYWFDYVAESEHHTYANGAWHGNEVPYVFNTLTLAEPSRNYVNENDLAFAVHVADYWVNFARHASRTCDVLHGPVRWPACIQGRDRVLRIGLKKFAGFKVENRFMRARLSLFKRVMTQHVSLD

SEQ ID NO: 373 - DNA, 759 bp, Fungi
atgtacgtctacaagcccgaccaggtcaagaccgatgcgctcgttgtagccattcacccctgcggatccaccggcccgagctactttggctgggcaccctggaaaaagggctcggattccaagggctacatctccgtgttcccgagcgcgacggcgtcgtgctgggatgtttcgagcaaggcgtcgttgtcgcataatggaggcggcgagtcgaatgctatcgctgatatgattacgtatgcgaccaagcagtacaacctcaatcccaagaaggtgtatgtggtgggagagtcttccggtgcgatgatgacgaatgtcttggccgcgacataccccgatcttatcgctgcgacttcggtgtactctggtgtcgctgctggatgctttgtgtcggcttctggagcggtggcggcgtggaacagtgaatgcgctcaaggacgttccatcaagactgcgcagcagtggggtgatattgcgcgcgcaatggatcctggctacaatggccagcgtcctcgtgttcaattctggcatggctctgttgatgccaccatcctcccgcccaactacaacgagacactcaagcagtggaccaacgtgtttggagtcagcactacgcctacaaggtcgcaggccaacacgccccagaccaactaccgcaccgacgattttggtcccaacgttcagggaatctgggcagttggtgtcggacacggtgtcccagctcaccaagctcaaactgaggcctggttcggattgtaa

SEQ ID NO: 374 - protein, 252 aa, Fungi
MYVYKPDQVKTDALVVAIHPCGSTGPSYFGWAPWKKGSDSKGYISVFPSATASCWDVSSKASLSHNGGGESNAIADMITYATKQYNLNPKKVYVVGESSGAMMTNVLAATYPDLIAATSVYSGVAAGCFVSASGAVAAWNSECAQGRSIKTAQQWGDIARAMDPGYNGQRPRVQFWHGSVDATILPPNYNETLKQWTNVFGVSTTPTRSQANTPQTNYRTDDFGPNVQGIWAVGVGHGVPAHQAQTEAWFGL

SEQ ID NO: 375 - DNA, 1050 bp, Unknown
  Obtained from environmental sample
atgctctggtttctgctcgctgtcgttactcttgttgtcctgatcacactgctgatcttccgggtaaaggatctttccgagtacgacggccaggactgggttatcaaggaagttgctccaaacccggctcatgatgaggtcatcgaacgcatcaaggacatggggcgcgcctcccgcggactgaagggcaaagcccggctgatcgccctccgcaaccatctggacagcctgggtgaaggcgtggatatcgaatcggacatccggcatcaggatcatccacgtggcgaatggatattggcgcccggggccgattcccgccgacgtgtgctctatattcacggcggtgcctgggctgctggcagccctcgcagtcaccgggcgattaccgaccgtttttcccggattgccaatgctgccgtttttgcggttgattaccggctcatgcccgaacaccggttcatggatggcattcgggactgccgccaggcctatgcatggctgctgaatcatggcccggacggcgaagcgcccgtcgactttatggtggttgccggagactcggcgggcggcagccataccctgtcactgctggcgtggattcgcgacaatggcctgcggcaggccgatgccgccgttgccctgtcaccctccacggatctcacgctgacggcgcctagcaatcgcgagaatattcgcacggacccactcctgggcccggtgtttggtggtttgtccaaaatcccgctgcccgtgttgtggtggggaacacttgccgcgttcagactctctcccaccaacccggttgcatcacctctgcggggtgagcttaacaagctgccacccgtgcttatccacgcaagcaccacggaaatgctgctggacaacgccacgcgttacgccgccaaggcaaaagcccagggttcaccggtggagcttcacacctggcagaacatggtgcatgtatggcacatcttcacgccactgctgcctgaggcagacgaggcattcgacgacatcgcggcttttctgaagaaagtggaacaaccttag

SEQ ID NO: 376 - protein, 349 aa, Unknown
  Obtained from environmental sample
MLWFLLAVVTLVVLITLLIFRVKDLSEYDGQDWVIKEVAPNPAHDEVIERIKDMGRASRGLKGKARLIALRNHLDSLGEGVDIESDIRHQDHPRGEWILAPGADSRRRVLYIHGGAWAAGSPRSHRAITDRFSRIANAAVFAVDYRLMPEHRFMDGIRDCRQAYAWLLNHGPDGEAPVDFMVVAGDSAGGSHTLSLLAWIRDNGLRQADAAVALSPSTDLTLTAPSNRENIRTDPLLGPVFGGLSKIPLPVLWWGTLAAFRLSPTNPVASPLRGELNKLPPVLIHASTTEMLLDNATRYAAKAKAQGSPVELHTWQNMVHVWHIFTPLLPEADEAFDDIAAFLKKVEQP

SEQ ID NO: 377 - DNA, 1044 bp, Unknown
  Obtained from environmental sample
atgaaaagatatttctatttgttcttatatcacctccttaccatacagttagttttcagtatatcactggaagcaaaaccgctgcttcttaaaaatgaatataaagttgctagggatgtagaatgggcaaaacctgatggattcagtctgacaatggatatctatacgcctgaaggtgataaagataattatccggtgctgcttatatttcacggcggtggttggctggcaaacgataaatctataatgaatgatatgagtcagtatgtggtccgacatggagactatgtagtgtgtaatattaattatagattgctcaaagaccagaacaataccgttaccatggaccagatagtggaagatgccttcggagcactgctatgggtcagagagcatgtcagtcaatatggaggtgatcctgaccggatagccgtatccggtgatagtgccggggggcacctggcggccatgatcgtaaatgccggtcctaatttaagtgagtcgggccttaaagatggagagaagggattcacgcccagctacattcctgaagggatgggtctggatgacataagggataagggctggatggaggttcagggggcagtattgaattacgccgctttagatatatataccttggcgaggaagggatatgaagaacaaaacaatagattttggcagggagcaggagtagaaccccgtggcattttcggcgatgattataatgtagaggataatcctgagctgtatcaggcggtgtctcccgttcatactctcccaagcgctacagagagaagattgcctccccaactactgactgttggaacagaagatgagcttataccaccgacacaaatcagagagtataaaaggcttttggaagaggcagggcatccggtagagtactgggagcacgaaggtagacctcatgcttttctggattcaggagaaaatcctcgtttgggtatcagctttgaagaggatgcccccgaggctttggataggattatagcttttctagatgctattttttaccaatag

SEQ ID NO: 378 - protein, 347 aa, Unknown
  Obtained from environmental sample
MKRYFYLFLYHLLTIQLVFSISLEAKPLLLKNEYKVARDVEWAKPDGFSLTMDIYTPEGDKDNYPVLLIFHGGGWLANDKSIMNDMSQYVVRHGDYVVCNINYRLLKDQNNTVTMDQIVEDAFGALLWVREHVSQYGGDPDRIAVSGDSAGGHLAAMIVNAGPNLSESGLKDGEKGFTPSYIPEGMGLDDIRDKGWMEVQGAVLNYAALDIYTLARKGYEEQNNRFWQGAGVEPRGIFGDDYNVEDNPELYQAVSPVHTLPSATERRLPPQLLTVGTEDELIPPTQIREYKRLLEEAGHPVEYWEHEGRPHAFLDSGENPRLGISFEEDAPEALDRIIAFLDAIFYQ

SEQ ID NO: 379 - DNA, 2049 bp, Bacteria
atggtgtttgaacaggatcctgcagcgcgctcgactttagaagtaataactacttacgctggattacatgcagtttggagtcacttaattgcccataaattatataaaaatagacgctatgtagcagccagaatgatttctcaactatcacgtttttttaccggaattgaaatacatccaggtgcaaaaatcggtaagcgtttatttatcgaccatggcatgggtgtagttattggagaaacatgtacaattgatcaatctaaaacaaatcaaaacaaccaacattctgtagctgaaagtgcacaactgaaaagtgatgagacagctaatcagccaaaaaaagaagaaggtagctcagtaaaacaagacgtccaaccgtctaaaaatgtaaatcaacaagacgtagctactcaatcaaatgagagagaaaataatgacataaaagatgaaggtcaaacttcaaagacgagcaatcaacatatccagagttctaacagtcataatcaatcaacaggaacaaaagacagctactcagaagaaatcgaccaaccattagtgaaattacaaaagccgtctaatgattctacatatcaaacacaatcaaaaacaaaacaagatagttctaaacaactccctcaagaaaaaacaacaaaacgtcaaattcaaacaactgaaaatgaacagacaactaaagttgattctaaaaaagctaatgacactcaaaatgttgaaaaacatactcaagagcctaaaaatgatacatcaacatcacaaaaaaatcatcaacaagtagctacaaaagaacaatctaatagaagtacaacaagggagacgcaaaagcaatcagcaaatgctaatcaaaatcatcagtctacacatcaagcacagttcaaaaaccaatatccagtagtatttgtccatggtttcctaggctttgcaggtgataatcaatttagtttagctccaaaatattggggtggtacaaaatacaatattgacagaaatttaactaatgagggatacaatgtacatgaggcaaatattggtgcttttagtagtaactatgatcgcgcagtagaattgtattactatgtcaaaggaggacgtgttgattacggtgcagcgcatgcagctaaatatggtcatcatcgctatggtcgaacatacaagggcatcatgcgtgattgggaacctggcaaaaaaattcattttataggtcacagtatgggtggtcaaaccattcgtcaaatggaagaattcttaagaaatggtaaccaagaagaaatagaatatcaacgtcaacatgggggtactatatccgatttatttacaggtggtaaagataatatggttgcttcaattactacacttggcacaccacataatggtacacctgctgcagataaaattggcacacgtaaacttgtaaaagaaacgattaatcgtattggtagattaagtggtggtaaagatgtagatatagatttaggtttttctcaatggggattaaaacaacaaccaaatgaaagctacattgattacgcggaacgtgtatccaaaagtaagatttggaatactgaagatcaagctgttaatgatctgacaacgcaaggtgctgaaaaaattaatcaacaaacaagtctaaatcctaatattgtctacactacttatacagggtcagcgactcacacaggacctcttggtaatgaattacctaattctagtgaaattcttttgttgaacttaaccagccgtattattggtaaagatgcaaacaaagaaattagaccgaatgatggtgtagttccagttatatcatcacaacatccttctaatcaagcctttaaaaaagttgatgatcatacaccagctactgataaaggtgtttggcaagtgagacccgttcaacatgattgggaccatttagatttagtaggtatggatgcatttgatttaacacatacaggtagagaattaggtcaattctatctaggtattatggataatatcatgagaatcgaagaagcagacggtattacaaataaataa

SEQ ID NO: 380 - protein, 682 aa, Bacteria
MVFEQDPAARSTLEVITTYAGLHAVWSHLIAHKLYKNRRYVAARMISQLSRFFTGIEIHPGAKIGKRLFIDHGMGVVIGETCTIDQSKTNQNNQHSVAESAQLKSDETANQPKKEEGSSVKQDVQPSKNVNQQDVATQSNERENNDIKDEGQTSKTSNQHIQSSNSHNQSTGTKDSYSEEIDQPLVKLQKPSNDSTYQTQSKTKQDSSKQLPQEKTTKRQIQTTENEQTTKVDSKKANDTQNVEKHTQEPKNDTSTSQKNHQQVATKEQSNRSTTRETQKQSANANQNHQSTHQAQFKNQYPVVFVHGFLGFAGDNQFSLAPKYWGGTKYNIDRNLTNEGYNVHEANIGAFSSNYDRAVELYYYVKGGRVDYGAAHAAKYGHHRYGRTYKGIMRDWEPGKKIHFIGHSMGGQTIRQMEEFLRNGNQEEIEYQRQHGGTISDLFTGGKDNMVASITTLGTPHNGTPAADKIGTRKLVKETINRIGRLSGGKDVDIDLGFSQWGLKQQPNESYIDYAERVSKSKIWNTEDQAVNDLTTQGAEKINQQTSLNPNIVYTTYTGSATHTGPLGNELPNSSEILLLNLTSRIIGKDANKEIRPNDGVVPVISSQHPSNQAFKKVDDHTPATDKGVWQVRPVQHDWDHLDLVGMDAFDLTHTGRELGQFYLGIMDNIMRIEEADGITNK

SEQ ID NO: 381 - DNA, 1287 bp, Unknown
  Obtained from environmental sample
gtgtcgattaccgtttaccggaagccctccggcgggtttggagcgatagttcctcaagcgaaaattgagaaccttgttttcgagggcggcggaccaaagggcctggtctatgtcggcgcggtcgaggttctcggcgaaaggggactgctggaagggatcgcaaatgtcggcggcgcttcagcaggcgccatgaccgctctagccgtcggtctgggactgagccccagggaaattcgcgcggtcgtctttaaccagaacattgcggacctcaccgatatcgagaagaccgtcgagccgtcctccgggattacaggcatgttcaagagcgtgttcaagaagggttggcaggcggtgcgcaacgtaaccggcacctctgacgagcgcgggcgcgggctctatcgcggcgagaagttgcgagcctggatcagagacctgattgcacagcgagtcgaggcggggcgctccgaggtcctgagccgagccgacgccgatggacggaacttctatgagaaagccgccgcaaagaagggcgccctgacatttgccgagcttgatcgggtggcgcaaatggcgccgggcctgcggcttcgccgcctggccttcaccggaaccaacttcacgtcgaagaagctcgaagtgttcagtctgcacgagaccccggacatgccgatcgacgtcgcggtacgcatctccgcatcgttgccatggtttttcaaatccgtgaaatggaacggctccgaatacatagatggcggctgcctgtcgaacttcccaatgccgatattcgacgtcgatccctatcgtggcgacgcatcgtcgaaaatccggctcggcatcttcggccagaacctcgcgacgctcggcttcaaggtcgacagcgaggaggagatccgcgacattctctggcgtagccccgagagcacgagcgacggctttttccaaggcatcctgtcaagcgtgaaagcttctgcagaacactgggtcgtcggcatcgacgtcgaaggcgccacccgcgcgtcgaacgtggccgttcacggcaagtatgctcagcgaacgatccagataccggacctcggatatagcacgttcaagttcgatctttcggacgctgacaaggagcgcatggccgaggccggcgcaaaggccacgcgggaatggctggcgctgtacttcgacgacgccggaatagaggtcgaattttctgatccgaacgaattgcgcggccagttgtccgacgccgcattcgcagacctcgaggattcgtttcgagccttgatcgcggcctag

SEQ ID NO: 382 - protein, 428 aa, Unknown
  Obtained from environmental sample
  DOMAIN (25)...(263): Patatin-like phospholipase
MSITVYRKPSGGFGAIVPQAKIENLVFEGGGPKGLVYVGAVEVLGERGLLEGIANVGGASAGAMTALAVGLGLSPREIRAVVFNQNIADLTDIEKTVEPSSGITGMFKSVFKKGWQAVRNVTGTSDERGRGLYRGEKLRAWIRDLIAQRVEAGRSEVLSRADADGRNFYEKAAAKKGALTFAELDRVAQMAPGLRLRRLAFTGTNFTSKKLEVFSLHETPDMPIDVAVRISASLPWFFKSVKWNGSEYIDGGCLSNFPMPIFDVDPYRGDASSKIRLGIFGQNLATLGFKVDSEEEIRDILWRSPESTSDGFFQGILSSVKASAEHWVVGIDVEGATRASNVAVHGKYAQRTIQIPDLGYSTFKFDLSDADKERMAEAGAKATREWLALYFDDAGIEVEFSDPNELRGQLSDAAFADLEDSFRALIAA

SEQ ID NO: 383 - DNA, 456 bp, Unknown
  Obtained from environmental sample
atgggagatcatatgaaccgtctcaaggaaatcagcgaactaaagcgccgcgccgatgagtttcagctggagaaccgcgaaatcatcggcaaatacacgctggaggaactctgctccatctacaacggcatcggaccggactcgtttccggactggctgcgcgacgtcatcagttcgcttcatccgagcctcgcgaccgtcgcgttcatacacgacatagagtggcacgagagcgatggctcgaaggagaagttcgccgaatcgaacgcccgtttcaaaaccaacggataccgggtcgccaaggctgagtacggctggtggaatccgctgcgctacatcgtgatgaaccaggcgcggcgcttcggcaatctctgtcaactcttcggctggccggcatggtgttcgccctgcgaatgcgccgtctgccgcaaaaaaaaggaaatggaaaatgcttaa

SEQ ID NO: 384 - protein, 151 aa, Unknown
  Obtained from environmental sample
MGDHMNRLKEISELKRRADEFQLENREIIGKYTLEELCSIYNGIGPDSFPDWLRDVISSLHPSLATVAFIHDIEWHESDGSKEKFAESNARFKTNGYRVAKAEYGWWNPLRYIVMNQARRFGNLCQLFGWPAWCSPCECAVCRKKKEMENA

SEQ ID NO: 385 - DNA, 1017 bp, Unknown
  Obtained from environmental sample
atgccagctaatgactcacccacgatcgactttaatcctcgcggcattcttcgcaacgctcacgcacaggttattttagcgacttccggcttgcgcaaagcgtttttgaaacgcacgcacaagagctacctcagcactgcccaatggctggagctcgatgccggcaacggagttaccttggccggagagcttaacacagcgcctgcaactgcatcctcctcccacccggcgcacaagaacactctggttattgtgctgcacggctgggaaggctccagccagtcggcctatgcgacctccgctggcagcacgcttttcgacaatgggttcgacacttttcgccttaattttcgcgatcacggcgacacctaccacttaaaccgcggcatatttaactcatcgctgattgacgaagtagtgggcgcagtcaaagccatccagcagcaaaccgactacgacaagtattgcctgatggggttctcactgggtgggaactttgccttgcgcgtcgcggtgcgggaacagcatctcgctaaaccgctagcgggcgtgctcgccgtatgcccggtactcgaccccgcacacaccatgatggccctaaaccgaggtgcgtttttctacggccgctattttgcgcataaatggaagcgctcgttaaccgcaaaacttgcagctttcccagactacaaatacggcaaagatttaaaatcgatacacacgcttgatgagttaaacaactatttcattccccgctacaccggcttcaactcagtctccgaatacttcaaaagttacacgctcaccgggcagaagctcgcgtttctcaactgccccagttacattctggcagctggcgacgacccaataattccagcatccgactttcagaaaatagccaagcctgcgaatctgcacataacagtaacgcaacaaggttctcattgcgcatacctggaaaacctgcataaacctagtgctgccgacaaatatgcggtgaaattatttggagcctgttga

SEQ ID NO: 386 - protein, 338 aa, Unknown
  Obtained from environmental sample
MPANDSPTIDFNPRGILRNAHAQVILATSGLRKAFLKRTHKSYLSTAQWLELDAGNGVTLAGELNTAPATASSSHPAHKNTLVIVLHGWEGSSQSAYATSAGSTLFDNGFDTFRLNFRDHGDTYHLNRGIFNSSLIDEVVGAVKAIQQQTDYDKYCLMGFSLGGNFALRVAVREQHLAKPLAGVLAVCPVLDPAHTMMALNRGAFFYGRYFAHKWKRSLTAKLAAFPDYKYGKDLKSIHTLDELNNYFIPRYTGFNSVSEYFKSYTLTGQKLAFLNCPSYILAAGDDPIIPASDFQKIAKPANLHITVTQQGSHCAYLENLHKPSAADKYAVKLFGAC

SEQ ID NO: 387 - DNA, 831 bp, Unknown
  Obtained from environmental sample
gtgatccagacatcttctctccacgtggaatcgtccggggaggggaagctctccgtggtcctggtgcacggcttcggcgccagcggccactcgtggcggaagtggcttccctcgctgaggagggaacacagggtccacgtgatcgacctgatgggagcgggccgggccgtggcgcctccctggggggactatacccccggggcccaggccgcacgcctggtggaggaactgaggcgcctcgggcgagggcccatcgtgctcatgggccactccctgggggcggcggtctcggtcctggccgccctccggatccgggacgcaggcggggccatccccgtcagcgggctcgtcctggtcggaggcgccgtccttccccagaagctcccgccgtacatatcggcggcccggacccccattctgggggaccttctcatgctggcctccccgcctcgctgggctctggagaggggcctcaagggaatcgtccacgaccccggcacggtcaatcgggagcaggtggagggataccgggaaccgctccggagcttccgccggcgaagggccctcctccgggccgcccggcaactcgatctcgcccagggagaggccctggccatacgcctccgcgagatcaccctccccaccctcctgatccacggccgggaagatggcgtgatcccgctggagatggggcagcggctctcccgggagatcccgggcgcccggctggtcatcctggacggggtggggcacctcccgccggaggaggccccggaagcgtccctggctcccgctctggagttcctggacgaactcagctctccgaagtga

SEQ ID NO: 388 - protein, 276 aa, Unknown
  Obtained from environmental sample
  DOMAIN (43)...(267): alpha/beta hydrolase fold
MIQTSSLHVESSGEGKLSVVLVHGFGASGHSWRKWLPSLRREHRVHVIDLMGAGRAVAPPWGDYTPGAQAARLVEELRRLGRGPIVLMGHSLGAAVSVLAALRIRDAGGAIPVSGLVLVGGAVLPQKLPPYISAARTPILGDLLMLASPPRWALERGLKGIVHDPGTVNREQVEGYREPLRSFRRRRALLRAARQLDLAQGEALAIRLREITLPTLLIHGREDGVIPLEMGQRLSREIPGARLVILDGVGHLPPEEAPEASLAPALEFLDELSSPK

SEQ ID NO: 389 - DNA, 915 bp, Unknown
  Obtained from environmental sample
atgtatgatgaaatccagaatcccgaatttgtcctctacaatgatcaaccgatcaggctttcagaactcctgcatgaacagaagcagttacgggacgaggttgccaggcagaagaagaatcagaaaaaggcgattcggcgcttcgaacgggaggaggcgctcaagccctatcaggctgaattgatacagatgcaacagtatctggagcggaccggtacccgcatgatcatcctcttcgagggacgcgatgccgccggcaagggcggtaccatccgccgcgtcacccgctacatgaacgaaaaacactaccgagtggtggcgctgggcaaacccactgaagagcagcgtacccaatggttcttccagaagtatgtgcgcgaatgtccatccggcggcgaggtggtactgttcgatcgcagttggtacaaccgcgccgtggtggagccaatctttggcttctgcacccaagaagagtacgaacatttcatgatcggctgccccggttttgagaaggatctggtgcgccagggtacgatcctggtcaagctctatttttcggtcaccaaggaggagcaggcgcggcgttttgaacggcgcaagagcgatcctttacggcagtggaagctttccgagatcgacgtacaggcgcaggatcgttgggatgacttcaccaatcagaagtatgagatgctgcgccgcaccaacaccactcacgcaccctggaccatcatccgctccaacgacaagcaccaagcccgcatcaacgccatgaaggtgatcctcaacgctgtgccttatcagcggctcgatccggaactcgactttgtgccggaccacgagatcgtcatctccggctcccgagaactggaattgatggaggcacaacgtctgcaaagcggcaagtttgttggatag

SEQ ID NO: 390 - protein, 304 aa, Unknown
  Obtained from environmental sample
  DOMAIN (44)...(272): Domain of unknown function (DUF344)
MYDEIQNPEFVLYNDQPIRLSELLHEQKQLRDEVARQKKNQKKAIRRFEREEALKPYQAELIQMQQYLERTGTRMIILFEGRDAAGKGGTIRRVTRYMNEKHYRVVALGKPTEEQRTQWFFQKYVRECPSGGEVVLFDRSWYNRAVVEPIFGFCTQEEYEHFMIGCPGFEKDLVRQGTILVKLYFSVTKEEQARRFERRKSDPLRQWKLSEIDVQAQDRWDDFTNQKYEMLRRTNTTHAPWTIIRSNDKHQARINAMKVILNAVPYQRLDPELDFVPDHEIVISGSRELELMEAQRLQSGKFVG

SEQ ID NO: 391 - DNA, 942 bp, Unknown
  Obtained from environmental sample
atgacgaccctattatggattctgatcctgatccttgccgggctcttgctgataacccggctgatctggcgctgggccgaacggcgagtgccaccggtaggcaaattctgtccggtcaagggcggcgtcattcactatgtcgaggccggcgatgcggacaaaccggttctggtcctgatccacgggctggcaggaatgctgcagcatttcagctatggcatgttggaaccgctgtcgcgcgaatatcgcgtgatcgcgctggaccgtcccggatgcggttattccacccgtgaccgggacgagttggcggcgccgctggtgcaggcacggatgatctggggcttcctggaccggatcggggtggaaaacccggttctggtcggccattcgctgggcggtgctatggcgctggccatggcgctggaacgacctgggggagcacgggccctggccctgatctgtcctgcatcccaatcgccgggaaccatccccgaggtttttcgccccttcgaggttgcctctcctgtggtgcggcgggtgatcggcaacctgctggccgtgccgatgggctggctgacaacggacaaggtcatgaaggctgtgttcgagccggaaccatggccccgggatttcctcgagcggggcggtgcaatgctcacctatcgcccgtccgcctttgtcggggcgtcggccgatcttgtcgaggcgcgcaatgccgtggatgacatgaccgcacgttatcgggatgagttaaaaacaccgggcgcgatcctgttcgggcgtgaggatgcgatcctgtcccccgacctgcacggaacggcgatggcagagttcggactgacttgcgaaatggttgagggtcgcggtcatatgctgccggtgaccgatcccgacgcctgttgcaatttcgtgcgccgggtggccgacatcatcaagccctga

SEQ ID NO: 392 - protein, 313 aa, Unknown
  Obtained from environmental sample
  DOMAIN (82)...(306): alpha/beta hydrolase fold
MTTLLWILILILAGLLLITRLIWRWAERRVPPVGKFCPVKGGVIHYVEAGDADKPVLVLIHGLAGMLQHFSYGMLEPLSREYRVIALDRPGCGYSTRDRDELAAPLVQARMIWGFLDRIGVENPVLVGHSLGGAMALAMALERPGGARALALICPASQSPGTIPEVFRPFEVASPVVRRVIGNLLAVPMGWLTTDKVMKAVFEPEPWPRDFLERGGAMLTYRPSAFVGASADLVEARNAVDDMTARYRDELKTPGAILFGREDAILSPDLHGTAMAEFGLTCEMVEGRGHMLPVTDPDACCNFVRRVADIIKP

SEQ ID NO: 393 - DNA, 1092 bp, Unknown
  Obtained from environmental sample
atgaccacatctacacaacacatcagcgagctacctctcttaccaggccgtctcggcgaccccgatcgcgtcttgaagactgatccccgtgccgatcctcggttggtcgccgcctgcgccccctttgctttagacgttgcgcccccacccgcaccggtgaacgcgcactcgcccttgcaggacaagctcgactacagtgcggccaacgaggcgggcatggaaaccgtgtttgccgccctgttcgccgacctcccgccgatgacgaacgtggagcggcggaccgaggtcatcaagggcgtggacggtaacgacatcaagctgtatatccatacgccccagcacgtttctggcccgctgccctgcgtgtatcatatacacggcggcggcatggtcattctgacggccgctggccctacctatgtacgctggcgggacgagcttgccgccctgggcatggtcgtggtgggtgtggaattccgtaatggcgccggcaagcttggcaaccatccctttccagccgggctcaacgactgcatgagtggcttacagtggacgtttgaccacaaaaccaccctggggatctcgaagataatcgtgtccggtgagtctggtggaggcaatctctccctggccgtgtgcctcaaggccaagaaggacaaacgccttgagcagattcatggtgtctacgccttgtgtccgtacatttatggcgcatgggcgcagaagagcaaagatctcccttccctatacgaaaacgacggctacttgatcaactgtagcctgatggaggtgctggcaagcgtctatgaccctgaaggcaaaaacgccaccaatccgctgtgctggccatactgggccacacgtgaggacctgcaaggtctgcctccgcatgtgatctcggtcaacgagttagaccccctgcgagacgaggggctgaaatactatcagaggctcctggcggctggggtgcgtgtatacagccggaccgtcaacggcacgtgccatgcgggcgacgtcctgttccgcaaagcgctcccggacgtgtacgcagccaccctccgcgatatcaaggggttcgcagactcgctgtag

SEQ ID NO: 394 - protein, 363 aa, Unknown
  Obtained from environmental sample
MTTSTQHISELPLLPGRLGDPDRVLKTDPRADPRLVAACAPFALDVAPPPAPVNAHSPLQDKLDYSAANEAGMETVFAALFADLPPMTNVERRTEVIKGVDGNDIKLYIHTPQHVSGPLPCVYHIHGGGMVILTAAGPTYVRWRDELAALGMVVVGVEFRNGAGKLGNHPFPAGLNDCMSGLQWTFDHKTTLGISKIIVSGESGGGNLSLAVCLKAKKDKRLEQIHGVYALCPYIYGAWAQKSKDLPSLYENDGYLINCSLMEVLASVYDPEGKNATNPLCWPYWATREDLQGLPPHVISVNELDPLRDEGLKYYQRLLAAGVRVYSRTVNGTCHAGDVLFRKALPDVYAATLRDIKGFADSL

SEQ ID NO: 395 - DNA, 408 bp, Unknown
  Obtained from environmental sample
atgaccatgcacgcagccgacatcgccagataccgaccaatctgcctcgcccttcctggcggggagatcctagaccgttacaccgatgaacaggccgccgctatctgcaacggtgtcggggccgcctgggtggaccgcatcgcgcctcacgcgtcggccatcctaaatcgccgtctcccatgggcggtcgccccgtcgatcattcacgaccttgcctatcacgagggcaggggaggagattccggacgcgccgccgcggattacaacttctggcggggatgccgccagcagatcgaggtcgtcagcgactacaagatcaccctctggtggcggaaccgcaaggccgacgtgctctaccgcacactgcggcgttttggccggctggcatgggagggaaaagatgactga

SEQ ID NO: 396 - protein, 135 aa, Unknown
  Obtained from environmental sample
MTMHAADIARYRPICLALPGGEILDRYTDEQAAAICNGVGAAWVDRIAPHASAILNRRLPWAVAPSIIHDLAYHEGRGGDSGRAAADYNFWRGCRQQIEVVSDYKITLWWRNRKADVLYRTLRRFGRLAWEGKDD

SEQ ID NO: 397 - DNA, 1176 bp, Unknown
  Obtained from environmental sample
atgcctgatgaaaaactcaatccggattctgtcgacaagactttccaaccgctcaaggagatgattgccgtcgaagtggacaagcgttcgcaactttggcgatcatggcacttcctgcaggtctattcttactggggcgtccggttgccgacaaccgagggcgacttcaacgccctgatgggtcattcgccggccgggtatgagttcttcccgccaatgcaggagggcaccaagcacatctccgacacctgcaaggattttctcacaaagacttaccctgcgatcgtcggcctgggacacgacctgctgaacttctccaagaacgcctcccccgacgacggcgcgctctttaacgaagtggcgaagttgatagacgagggcgccgccgcagatgcggtcacgctgctaacggatcttcaggcgacggcggacgattgcaagagccgcgccgaagcgcagaccaaaagtctggccgaattcaattccgaactcgtcgtggcgttgggaaagcttgccaccgctaaaatctccctcgacaaggacgagaagaccaacgaagcggagataaacaagcttgccggcaaggacgaccaggagggctcgcttgcctactatcgcaagcagattgcgaaccagcgcgaggagtataatcaactggtaaccatagccgccacgaccccgacctatgtctgggtctggccctttggcactattccggcgatcgtcgtcgcggggatctacactgatcgcgccataaaaaagctcaagcaaatcgagtcgatggaatcggacctgcgaaagaaggacgctggcctgttcgcggccaatcaggcgcgcctcatctattcagtcggggacgacggactgcggaacgtgactgtctacacccagcaagcccaggcccactgcaccatcgtgcaggatgcttgggcgggaatcagcggcaacatctcagaagtgaaagcctggatcgacaaggctacccacgctaatgccgagggcgtggtcgaaccccagtcgaagacgatcctgaaaatctacctgcaacgccttggcgcggcttggagcagcatgaaacctgcgctcatagatctgaccaccgatagcttcgtcacgctggaacccggcaacaagacgcccggccagttcgccgacgaggcaagcaaggccgcatga

SEQ ID NO: 398 - protein, 391 aa, Unknown
  Obtained from environmental sample
MPDEKLNPDSVDKTFQPLKEMIAVEVDKRSQLWRSWHFLQVYSYWGVRLPTTEGDFNALMGHSPAGYEFFPPMQEGTKHISDTCKDFLTKTYPAIVGLGHDLLNFSKNASPDDGALFNEVAKLIDEGAAADAVTLLTDLQATADDCKSRAEAQTKSLAEFNSELVVALGKLATAKISLDKDEKTNEAEINKLAGKDDQEGSLAYYRKQIANQREEYNQLVTIAATTPTYVWVWPFGTIPAIVVAGIYTDRAIKKLKQIESMESDLRKKDAGLFAANQARLIYSVGDDGLRNVTVYTQQAQAHCTIVQDAWAGISGNISEVKAWIDKATHANAEGVVEPQSKTILKIYLQRLGAAWSSMKPALIDLTTDSFVTLEPGNKTPGQFADEASKAA

SEQ ID NO: 399 - DNA, 1704 bp, Unknown
  Obtained from environmental sample
atgacaagcactcttggagaacgggccgtgcgcgcggccatggcgatcgcggcgggcggcgcgctggccgcctgtggcggcgtgtcgctggagcctgcggcgcccgcgccggtggcctgcgagaaattgcaggggctggccatcccggcggcgtccatcgggctgccgaccaccggtgccacggtgacctcggccaagctggtggaggccagcggcagcggcgccaccgccgtgccggcctactgcgaagtggcgggcaggattgcgccggtggatgccacggcccccaacatcctgttccaggtcggcctgccggtgaactggaaccagaaggccatgatgttcggcggcggcggcttcaacggcagcgtccccagcgtgaagaacaacgtgccggccgggccggccgaccagcccacgccgctgggccggggctatgcgaccttcgccagcgattccgggcaccagtccggcccgctgaccacgcgcgatggcctgttcgccatgaacgacgaatcgctgcgcaactacggcggcgatgccttgaagaaaacgcgcgacactgcagtggcgatcatccaggcgcactatggcaagctgccggcgacctcgtactttgccggtgggtcgaacggcgggcgcgagacgctgaccgccatccagcgctggccggccgactgggacggtgccatcgcctggtacccggcgtggaacgacgtggcggccctgctggccgggcaggtcatgggccgtgcgctggcacagcccggtgcctaccccaacccggccaagcggctcgcgctgttcgatgcggcgctggaggcctgtgatgcgctggacggcgtggccgatggggtcatcagccaccagaatgcgtgcaacgcgcgcttcgatccgtccaccgcaatgctgcgcggcgtgccgctgcgctgccccggcggtgccgatacgggagactcctgcctgtcggatgcacagatcgtggcgctcaagaagatcaacagcccgttcagcttcaaggcgcccatgctcaacggcgacaccgaccacccgggcttcaacgtctggggggctgacaccggcatcactgcctggaacaagccgacccaggcgtacgtgagcctggtgaacttcaacacctcgcagccggcgtttcccatgcccgtcacggcgcccttcatggccatcctgggcgaccaatgggtgcgttacttcgtggcgcgcgacccgaacctcaactccctgggcttcgatccggagaacctggggccgtggacggcccgcgtgcaggaggtcagccggctgctggacgccaagacggacatctccgccttccaggcccgcggcggcaagctgctgattgcccatggcctggccgatacggtcgtcagctcgcgccccacacaggaatactaccgccgcctgcaggcccagttcggcgcgtcgaaggtggccgggttcgttcgctactacgaggtgcctggctacggccatgcgtccagccaggtgttcaacgcggcatgggattcgctgacggcgctggacgcctggcgcgtcgacggcaagatccccgtggcccaggtggtgacggacatcaccggggtgccgggccgcacgcggccgatgtgcgagtacccggcctggccacggtacaagggcagcggcgacgcgaacctggcggcgtcgttcgagtgcgcgcaatag

SEQ ID NO: 400 - protein, 567 aa, Unknown
  Obtained from environmental sample
MTSTLGERAVRAAMAIAAGGALAACGGVSLEPAAPAPVACEKLQGLAIPAASIGLPTTGATVTSAKLVEASGSGATAVPAYCEVAGRIAPVDATAPNILFQVGLPVNWNQKAMMFGGGGFNGSVPSVKNNVPAGPADQPTPLGRGYATFASDSGHQSGPLTTRDGLFAMNDESLRNYGGDALKKTRDTAVAIIQAHYGKLPATSYFAGGSNGGRETLTAIQRWPADWDGAIAWYPAWNDVAALLAGQVMGRALAQPGAYPNPAKRLALFDAALEACDALDGVADGVISHQNACNARFDPSTAMLRGVPLRCPGGADTGDSCLSDAQIVALKKINSPFSFKAPMLNGDTDHPGFNVWGADTGITAWNKPTQAYVSLVNFNTSQPAFPMPVTAPFMAILGDQWVRYFVARDPNLNSLGFDPENLGPWTARVQEVSRLLDAKTDISAFQARGGKLLIAHGLADTVVSSRPTQEYYRRLQAQFGASKVAGFVRYYEVPGYGHASSQVFNAAWDSLTALDAWRVDGKIPVAQVVTDITGVPGRTRPMCEYPAWPRYKGSGDANLAASFECAQ

SEQ ID NO: 401 - DNA, 774 bp, Unknown
  Obtained from environmental sample
atgtattttgaatataagaatcgaaagattttttacaatatagaaggatcgggtcctgtcatattgtttttacacggtcttggaggaaattcgaataattggttatatcaaagaaaatacttcaagaagacatggaccgtaatctcactcgatttacctgggcatgggaaatccgaagggatggaaattagttttaaagaatattcaaatgttttatatgagttatgtaatcatttaaagctaaaatcagtaacaatttgtggtctttcaaaaggagctagagtgggtatcgattttgctattcaatatccacgttttatttctagcttaattgttgtaaatgcatttccctatttagaaccggcagatcgtaaagaacgacttgaagtatatgatttacttagcttgcaggataaagggaaaacttgggctgatacgttattgagagcaatgggagtagaagataatgatgcaattgtccgaggatttcatcaatccctacaaatgattcatccgacgcatattcaaaggctattcgctgaattagttgattacgatcaaagaccatacctctctaacattgcatgtcctgcattaataatacgaggagagaatgattattttgttccggaaaagtatgtgagagaatttgaaaaacacctgagaaacgtgaccttcgttgagttgaaaaatagtgggcacttgccttatttagaacagcctactagctttaatgtgacggtagaggcatttttaaatcatgcgcttgattaa

SEQ ID NO: 402 - protein, 257 aa, Unknown
  Obtained from environmental sample
  DOMAIN (45)...(250): alpha/beta hydrolase fold
MYFEYKNRKIFYNIEGSGPVILFLHGLGGNSNNWLYQRKYFKKTWTVISLDLPGHGKSEGMEISFKEYSNVLYELCNHLKLKSVTICGLSKGARVGIDFAIQYPRFISSLIVVNAFPYLEPADRKERLEVYDLLSLQDKGKTWADTLLRAMGVEDNDAIVRGFHQSLQMIHPTHIQRLFAELVDYDQRPYLSNIACPALIIRGENDYFVPEKYVREFEKHLRNVTFVELKNSGHLPYLEQPTSFNVTVEAFLNHALD

SEQ ID NO: 403 - DNA, 921 bp, Unknown
  Obtained from environmental sample
atggacgttgttttagctttaggagctggtggggtaaaaggtttcgctcatatcggtgtgctgcgggtattagagcgacacgggttccgtatcagggctatcgcagggacgagcattggcggaattgtcggctcggtctactgtttgggtctcaacccggacgagatcgaaagcaagctgcgggtgatggaccaaaagaagttttacggccggatacccggagatggaccgtccattatgggggtatccgggttggtcgagatcttcaaagagatcttcggcgatatgaacctggagcaactgcgtctcccctttgcggttaatgccgtagatctggaaacagctgaagaagtcaatatcacccgcggaagaatcgtcgatgcgatcctggcgaccaccgcggtaccgggcatatttccacccagaaaggtgaacaaccagactctactggatggaggggttctcaaccccgtacctgtctcactggcgcgcgcactggccccagggctaccggttgtggcagtcgtgctatctccatcattacaaggctgggtagcccggccttcgccgcgcctgctgggaggattaccgcttatggggagctatatctcccagctgcgcccagcccaggccttggaaatcttcttccgctcggttgatatggccagctgcttaatggcagatctgcgcttggagaaggagcagccggaagtgattatccgaccggcgatcgatgggatcgggttgatcgacgaagtgaatgtggaggagatggtcaaaaaaggcgaaactgctgctgagctggccataccagagctacgatgggccgtcagttggcgagcgcgaataagccgccgcttcccctgggaaggtatgcggcgggctacgagccatcctgttcaaacgcacaatgggtcttga

SEQ ID NO: 404 - protein, 306 aa, Unknown
  Obtained from environmental sample
  DOMAIN (5)...(164): Patatin-like phospholipase
MDVVLALGAGGVKGFAHIGVLRVLERHGFRIRAIAGTSIGGIVGSVYCLGLNPDEIESKLRVMDQKKFYGRIPGDGPSIMGVSGLVEIFKEIFGDMNLEQLRLPFAVNAVDLETAEEVNITRGRIVDAILATTAVPGIFPPRKVNNQTLLDGGVLNPVPVSLARALAPGLPVVAVVLSPSLQGWVARPSPRLLGGLPLMGSYISQLRPAQALEIFFRSVDMASCLMADLRLEKEQPEVIIRPAIDGIGLIDEVNVEEMVKKGETAAELAIPELRWAVSWRARISRRFPWEGMRRATSHPVQTHNGS

SEQ ID NO: 405 - DNA, 939 bp, Unknown
  Obtained from environmental sample
gtgccgctcgatcccgtcatggacatggtgatccaacagatgtcccgacagggcgaggctctgtgggaactgcccatcgaggaagctcgacggcgggcggacgacggtctgctgaccctggtcgaccgcttcggcctcgaggagatggcccgggtggtcgagcgcgaggtgcccggtgaggcgggcccgatccgcgtacgcctctacgaccccggtggtcacggaccccgtgccgcgctggtgtacttccacgggggcgggtacgtgctgtgcagtctcgacacccacgatcagctgtgccggttcctcgcccgcttcgccgactgcatcgtggtgtcggtcgactaccggctggctcccgagcatccgtacccggccggggtgaacgatgcctgcgatgccaccgtgtgggtccaggaccacgccatggatctcgggatcgatccgacccgtgtggcagtcggcggtgacagcgcggggggcaacctcgcagccgtggtcgcgttgtggcaccgcgacgagggggaacgtcctccactgcgcacgcaggtgctcctctatcccggcgtcgaccgtcgcggtggctacgcgtcgctcgagaccaacggtgagggatacctcctgaccaccgagatgagggagtggttcgcgcgctgctacgtgcccgacgggatggatctcgccgactggcgcttgtcgccgatgtgcgctccgagccacgagggggtggcccccgcgatcgtggtcacggccgagtacgaccccttgcgcgacgagggcgacgcctacgccaggcgtctcgccgaccacgggatcgcggtccatcacatcaccgccgacggcatgatccacgggttcctgcagttcgctcccttccacgatggcgcccgggcggtcctccaacgggtcgccgacgagctcgcggcggccctggcgtga

SEQ ID NO: 406 - protein, 312 aa, Unknown
  Obtained from environmental sample
MPLDPVMDMVIQQMSRQGEALWELPIEEARRRADDGLLTLVDRFGLEEMARVVEREVPGEAGPIRVRLYDPGGHGPRAALVYFHGGGYVLCSLDTHDQLCRFLARFADCIVVSVDYRLAPEHPYPAGVNDACDATVWVQDHAMDLGIDPTRVAVGGDSAGGNLAAVVALWHRDEGERPPLRTQVLLYPGVDRRGGYASLETNGEGYLLTTEMREWFARCYVPDGMDLADWRLSPMCAPSHEGVAPAIVVTAEYDPLRDEGDAYARRLADHGIAVHHITADGMIHGFLQFAPFHDGARAVLQRVADELAAALA

SEQ ID NO: 407 - DNA, 387 bp, Unknown
  Obtained from environmental sample
atgcgcgtcggtcggctggtcgagggttcaggggtccgcctgtgggccgaggtgtgggggccgccggcggcggttccggtggtcctcgtccagcggatggcggctcaggggttcgagtggccgcggtcgctcgtctcggcgctcctcgacgcgggctaccgggtgctgacctacgaccaccgagggttcggttggtcgacggagggcccgctcgaccggcccttggccttcggcgagttggtcgaggatctgggcgcggttctggacggattcgggatggacgatgtccacctggtggggacctcggtcggtggggtgatcgcgcgttgcctggcgctcgatcggccgggtctggcccggagcctgaccttcatcggatccaaagaa

SEQ ID NO: 408 - protein, 129 aa, Unknown
  Obtained from environmental sample
MRVGRLVEGSGVRLWAEVWGPPAAVPVVLVQRMAAQGFEWPRSLVSALLDAGYRVLTYDHRGFGWSTEGPLDRPLAFGELVEDLGAVLDGFGMDDVHLVGTSVGGVIARCLALDRPGLARSLTFIGSKE

SEQ ID NO: 409 - DNA, 873 bp, Unknown
  Obtained from environmental sample
atgattatgattatgaacaagaactgtcgcccctgcatcacccctcggcctctcatccgcttggcccttctcgtactcatgctccccggtccggcatgcagtatcgccgagctagatacgacgcagcgccgcgaaaacggcctcgtcgtcatcctcccgggcatcgaaggaccgagctactggaaccataacctcgcgcggggcctggccgacggcggcgtccgaaacgccattcagatatatgactgggggacgaagattcccggcgggatgctcctcaacctgacggactacgagcgcaatcgagaaatggcggcttcgctgcgcgaccatatcgtcgcctatcgaagggagtatccgtcgcgcggcgttcaccttgtgggccactccggcggcgccggcattgcggtgatggcgacggagatgctgccggaaaacgagcgtgcgacaacggtgatcctcctcgccgcggcgctgagtccggagtatgacctgcagcccgcgctgagcaatgtttcgggtggaatttttaattactactcaaagctcgacgccgcgatgctcggggtcggcaccacggtggccgggacaatggatcggcgtcatacacaggcggctggcgcgatcgggttccgccggccggtgcgccagagcgaagcgggcagcgacccctaccgaaaactgcaccaggtggagtggagcccgaagatgcgaacatacggccacttcggggaccacatgggctggacccatcggtcctttgtccgccgctatctcgctcctttgatcgtggaattcaattcgtggccggcccacccgccgacggggatcgatgccccgcggcgttcgagcgaactgatcgccgagggctaa

SEQ ID NO: 410 - protein, 290 aa, Unknown
  Obtained from environmental sample
  SIGNAL (1)...(36)
MIMIMNKNCRPCITPRPLIRLALLVLMLPGPACSIAELDTTQRRENGLVVILPGIEGPSYWNHNLARGLADGGVRNAIQIYDWGTKIPGGMLLNLTDYERNREMAASLRDHIVAYRREYPSRGVHLVGHSGGAGIAVMATEMLPENERATTVILLAAALSPEYDLQPALSNVSGGIFNYYSKLDAAMLGVGTTVAGTMDRRHTQAAGAIGFRRPVRQSEAGSDPYRKLHQVEWSPKMRTYGHFGDHMGWTHRSFVRRYLAPLIVEFNSWPAHPPTGIDAPRRSSELIAEG

SEQ ID NO: 411 - DNA, 879 bp, Unknown
  Obtained from environmental sample
atgaggggcgggcaggggctgcagcgtctcgttccgatggttttttccgcctttctggccgcctgctcgccgctcgaagccttcaactcgctcgtcccgaaggaccgcggcggtgaaacggtgcagcgcggtgccgcgttcggtgcccatccgcgccagcgagtcgatgtctatcgtccgcgcgcgcgcagaggagcggtgcgcgagacgctgccgatcatcgtcttcctatacggcggctcgtggcagtcggggactcgcgaaggctatggctttgccggacgagcgctcgcagcgcgcggattcgtcgtcgccgtccccgattaccgcctcgtcccggaggttcgcttcccagccttcctagaggacaacgcggccgccttgcgctgggtgcgggccaatgcggcgcgcctgggcggcgatccggaccgcatcgtgctcgtcggccattcggcgggcgcgtacaatgcggcaatgctcgcgctcgacccgcgctggctgggaggggatcggcgcgcggtgcgcggcttcgtcggccttgccgggccctacgatttcctgccgctggccgggccggtgacaagagctgcgttcgggcaggagcgcgatcccgtgcagacgcagccgataagcttcgcctcgtcgggcgatccccccgccttgctcctccacggcgccaacgacacgacggtctatccgcgcaacagccagcgcctcgccgagcggctgcgcggcgccggcgtcgacgcgcgcgtaaagctctacccggagcttggccatatcggcatcgtcaccgcgctcgcgcggccgttccggggacgcgcttcggtgctcgacgatgttgccactttcgccaacgaagtgactgcgacgcgttag

SEQ ID NO: 412 - protein, 292 aa, Unknown
  Obtained from environmental sample
MRGGQGLQRLVPMVFSAFLAACSPLEAFNSLVPKDRGGETVQRGAAFGAHPRQRVDVYRPRARRGAVRETLPIIVFLYGGSWQSGTREGYGFAGRALAARGFVVAVPDYRLVPEVRFPAFLEDNAAALRWVRANAARLGGDPDRIVLVGHSAGAYNAAMLALDPRWLGGDRRAVRGFVGLAGPYDFLPLAGPVTRAAFGQERDPVQTQPISFASSGDPPALLLHGANDTTVYPRNSQRLAERLRGAGVDARVKLYPELGHIGIVTALARPFRGRASVLDDVATFANEVTATR

SEQ ID NO: 413 - DNA, 1005 bp, Unknown
  Obtained from environmental sample
atgcgaaagaagctggttcgtctgttggcgtggatcgccggcctttgcctgcttgggctggtgctgctggttgccgcgttctgggcgccgtcgcggtcggtggacgacctcaaggcgcgctgggcaacgccgccttccaccttcctggccatcgacggcatgcaggtgcacctgcgcgacgaagggccgcgcgacgacccggcacccttgctgctcctgcacggcacgtccgacagcctgcatacctgggagggctgggtgccgccgctggtgcaggcggggcaccgggtcatccgcgtggacctgccgggttttggcctgaccgggccgttccccgacggtgaccaccgcattgccgcgtacccgatattcctgtcacacctgctcgacgcgctggacgtgcgccgggtggtggtggcgggcaattccttcggtggccaggttgcgctggagctggcgctggccgagcccgatcgcgtcgagcggctggtgctggtggacgcgctggcctatccacgcaatgccaccaaggtgcccgtcgcgttcgtggtggcgtcggtgccgggcttgaaccggatcatggactacgtgctgccgcgttcgctggtcgaaggcagcgtgcgcagcgtatatggcgatccgtcgcgggtgacgccggcgctggtggaccgctactacgaactggccctgcgcgagggcaaccgaacggcgctgcgcaaccgcttcgccgggcttcccgacgaggcctacgcgcagcgcgtgaagcggctccgtttgccggtgctgctgctgtggggcgggcgcgaccagctcattcctattgcggcggccgaccgcttcctggccgacatcccgggcagccggctggtggcgttcccggacctgggccacgtgccgcaggaggaggacccgttggcttcggtggcgccggtgctggcgttccttcgtgaagccgacccggccgaacccggcgccagctcagcgcaggaagtgcagggccagtga

SEQ ID NO: 414 - protein, 334 aa, Unknown
  Obtained from environmental sample
  DOMAIN (95)...(313): alpha/beta hydrolase fold
MRKKLVRLLAWIAGLCLLGLVLLVAAFWAPSRSVDDLKARWATPPSTFLAIDGMQVHLRDEGPRDDPAPLLLLHGTSDSLHTWEGWVPPLVQAGHRVIRVDLPGFGLTGPFPDGDHRIAAYPIFLSHLLDALDVRRVVVAGNSFGGQVALELALAEPDRVERLVLVDALAYPRNATKVPVAFVVASVPGLNRIMDYVLPRSLVEGSVRSVYGDPSRVTPALVDRYYELALREGNRTALRNRFAGLPDEAYAQRVKRLRLPVLLLWGGRDQLIPIAAADRFLADIPGSRLVAFPDLGHVPQEEDPLASVAPVLAFLREADPAEPGASSAQEVQGQ

SEQ ID NO: 415 - DNA, 1014 bp, Unknown
  Obtained from environmental sample
atgaaaacaccggggtttctgcggtgtatcgctaccgctacgatagatggtacggaataccggggcctggctacggctggctttgatcctttaaaaattaaacctaccaccgacgtacccaaagattttataaatttttgggacaatgcaaaagcggccgctgctaaaatacccatggatgcccgcatgactttaatgccagatcgttgtaccgaaaccgtaaacgtgtaccacgtaagtctgcaaaactttgccctgaactcccggctttatggtattttatgtgttccgaaaaaagaaggtaaataccccgctattttaaaagtgcccggggcgggtgcccggccttacagcggggatgtagctgcagcagaaaaaggttttataacgttagatataggaatacatggcgtaccggttaccatggatgccagcgtttatggtaatttaatggcgggggccatcagcaattattggactcatggcttagacgataaagatcggtactattacaaacgggtttatatgggctgtatccgggcgaatgactttatttcaagtttaccccaattcgatggccagaacttggctgtaaccggcggtagtcaggggggagctttaagtattgtgaccgcggccttggactccagggtaaaatacctggtggcttattacccggcccttagcgatttaactggctacttacaccaaagagctgggggctggcctcatttatttgataaaaccaattacagctttaatggcaaaaaagataagatcgaaacttcgaaatattacgatgtggtaaattttgcccgcctggtaaaagtgcccggtttttattcctggggttataacgatgaaacctgcccgcctacctccatgtatgctgcctacaatgttattactgcccccaaagacttatttttggcccttgaaactggtcactggacttacccggaacagtatgaaaaaacaaatccctggctgtatggaaaattgcagggcaagtag

SEQ ID NO: 416 - protein, 337 aa, Unknown
  Obtained from environmental sample
  DOMAIN (27)...(333): Acetyl xylan esterase (AXE1)
MKTPGFLRCIATATIDGTEYRGLATAGFDPLKIKPTTDVPKDFINFWDNAKAAAAKIPMDARMTLMPDRCTETVNVYHVSLQNFALNSRLYGILCVPKKEGKYPAILKVPGAGARPYSGDVAAAEKGFITLDIGIHGVPVTMDASVYGNLMAGAISNYWTHGLDDKDRYYYKRVYMGCIRANDFISSLPQFDGQNLAVTGGSQGGALSIVTAALDSRVKYLVAYYPALSDLTGYLHQRAGGWPHLFDKTNYSFNGKKDKIETSKYYDVVNFARLVKVPGFYSWGYNDETCPPTSMYAAYNVITAPKDLFLALETGHWTYPEQYEKTNPWLYGKLQGK

SEQ ID NO: 417 - DNA, 879 bp, Unknown
  Obtained from environmental sample
atgaagaatgcgttgacgaactggctgtgccgcaaattgatcgactcaaaatgtgaaaaattcggcctgagcaaagccagcgtgaatacagtggatgggcgcactgtctactttaaaggtgggcaagggcccgatatggtattgctccatgggtttggcgccaataaagaaaactggctggccctggcgccccgtttaatgcgtcattacacggtatggattcccgacttgattggtttcggcgagtcagacaggccgttaaacgcccgtttttcgattggtgcgcagtctgagcgcgttattcattggctagacgcagtcgatgtcaaaagctttcatgtaataggcaactccatgggcgggtatttggcgggttttctggcagcaaactatgaacaaagagtgctcagcgcttgtctgcttaatccagccggtgtcaaaggtgctgaacacacagccattggacgggcattcgcagacgagggaaaggttattttggcccccagtaatttcgaagaatacgaacgtgtgatcaatttgtgtttcaacgacaaagcgcctccaatgcccaatttcatgcgcaaatatttcggacgcatgtcatttcagaacaaggcgctgctagaccgggtgtttatggaatttgtaaaccccgataacaacgtcagcttgaatgacatggtgagcagcaccaaggtccctttgatggtggtgtggggtgattcagatcaactggttcatccaagtgggctggctgttctcaaagaagccaaccctggcatcaaggacatcatgctggaaaacaccggccattgcccaatggtggacagggcgtccttggtctacaaggcacacttggcctttatgccagcaacttga

SEQ ID NO: 418 - protein, 292 aa, Unknown
  Obtained from environmental sample
  DOMAIN (70)...(287): alpha/beta hydrolase fold
MKNALTNWLCRKLIDSKCEKFGLSKASVNTVDGRTVYFKGGQGPDMVLLHGFGANKENWLALAPRLMRHYTVWIPDLIGFGESDRPLNARFSIGAQSERVIHWLDAVDVKSFHVIGNSMGGYLAGFLAANYEQRVLSACLLNPAGVKGAEHTAIGRAFADEGKVILAPSNFEEYERVINLCFNDKAPPMPNFMRKYFGRMSFQNKALLDRVFMEFVNPDNNVSLNDMVSSTKVPLMVVWGDSDQLVHPSGLAVLKEANPGIKDIMLENTGHCPMVDRASLVYKAHLAFMPAT

SEQ ID NO: 419 - DNA, 1275 bp, Unknown
  Obtained from environmental sample
atgaataagacggtctttgcctggttgtttctacttttgatttttacttcctttacaacacctgcaccgggccctcaataccgcaaagcgccaacgttgattaataacatggtaaaggcacgtattgatgccagcctgaaaagttttgttgattctggcaaagtagcaggtgtttcggctttaatcttcgaaaaaaacaaagaagtatattataatgctttcggccatgccgaccgggagactaaaacacccatggaccggaataccatcgtccggatttactccatgacaaagcccgtaaccggcgttgcgctgatgcaattatatgagaaaaacctttttcagctggatgatcccttagctaagtacgccccggaatttgcccaaatgaaggtgtttaaaggaatagatacttccggcaatttaatcctggaacccgcaaaacgccctattaccattcgcgacctgactcgccatacggccggttttgccaccagctcagatcttccggccggactggctgaattggttaaaaagattgatgctatgaatccggctaacactttgaggcagatggtcctaaaattagccaatcagccgctgctgtttcaccccggtgagcaatgggcttacggcccatcggtggatgtgcaggcctatctagtagagcaaatttccggcaaacccttcgaccagtacctgcaggaaaatatatttaaaccgttaggcatgacccacacccggtatattgttccggcaggcgactgggcaaaattagccggtatgtatcggaacagcccaaatggtccattaacccgcgtacccgatgatgaaaattcgtataatatcaaagactggcctttgaaaacgggtggctatggccttacctctaccctggatgattacatgaagtttgcacaaatgctggtaaataaaggcaaatggggcaaagctttaattctaaaacccaaaaccgtaaggttaatggctaccaaccacctgtcagaagatatcaccgagcggatgtggctgcccagcaaaggccaggtaggctttggtatagactttgccgtgcgtcttcgggctccggctactcccgaagaaaacaacggggtggtaggtgagtttttctgggatggagccgccagtaccttgttttgggttgatccggtgcatgaaattacggccgtattgtttgtacaaataatgcctttttctggcaaactgcacaagagtttccgggatgccgtttacggcgagtataaacctcaataa

SEQ ID NO: 420 - protein, 424 aa, Unknown
  Obtained from environmental sample
  SIGNAL (1)...(19)
  DOMAIN (42)...(419): Beta-lactamase
MNKTVFAWLFLLLIFTSFTTPAPGPQYRKAPTLINNMVKARIDASLKSFVDSGKVAGVSALIFEKNKEVYYNAFGHADRETKTPMDRNTIVRIYSMTKPVTGVALMQLYEKNLFQLDDPLAKYAPEFAQMKVFKGIDTSGNLILEPAKRPITIRDLTRHTAGFATSSDLPAGLAELVKKIDAMNPANTLRQMVLKLANQPLLFHPGEQWAYGPSVDVQAYLVEQISGKPFDQYLQENIFKPLGMTHTRYIVPAGDWAKLAGMYRNSPNGPLTRVPDDENSYNIKDWPLKTGGYGLTSTLDDYMKFAQMLVNKGKWGKALILKPKTVRLMATNHLSEDITERMWLPSKGQVGFGIDFAVRLRAPATPEENNGVVGEFFWDGAASTLFWVDPVHEITAVLFVQIMPFSGKLHKSFRDAVYGEYKPQ

SEQ ID NO: 421 - DNA, 1215 bp, Unknown
  Obtained from environmental sample
atgaacttcaaaaaaacactgttggcgctggctttagtcttggctgacagtaccgcagcagccagcaataacgaccccattgtgctagtgcatggcttcgccggttgggatcgcgacgagctatggggcctttacccgcactggggcggcactaccgacctgcaagaggaattgaagaagaacggccatgacacggttaccgccgccgtcgggcccttcagctccacctgggatagagccgccgagctttactaccagctcaagggtggctgcgtggactatggcgcggcgcatgccgcccaacacggccatgcccggatcggccgctgctataacggcaaccagccatatgtagatgccaaacgcctgccccaatgggataccagccacaagatccatctgatcgcacacagccagggcgcgcccaccgtgaacatgctggtggaactgctgcgcaatggctcagtggccgagcgggctgccagcggcagtacggtgggcgagctctatctgggcggcaaggattgggtgcgttccattaccaccgtggcaggtgccaacaatggcaccacctttggcaagttgaccggcttcaatgaatttgccaaacagttgctgaaagccgtgggcgccattgccggtttaggcggcaatccggaagacctgccttacgatttcaagctagaccagtggggcttgaagaaaggcagtaacgagacccagcaacagtattgggatcgcgtctgggcgtcgccaatctggcatagccaggatgtgggtctctataccctcagcccagaaggcgcagcggcggagcggacttgggtcaagacttcccccaacgtttactatttttcctacaccaacggcaccaccctgcccggcctgatcaccggcaaccactacgccgacccaaccaccaatctgccgctggtgccgtttgccaatggcatgggcgcttatcgggcttatggtgacaactggcgacagaacgatggcgtggtaaataccatcagcatgaaagcgccgtttggtgcgccggtggtggaatacaacggcaacccccaaaagggcaaatggaaccacatgggtttcagccagcaggatcactgggaagtgatcggcagcggcgacgtggccggtaatctgttctacaactggcggctggtcagcttctacgtcaatcaagccaatctgctaaagcagctggattga

SEQ ID NO: 422 - protein, 404 aa, Unknown
  Obtained from environmental sample
  SIGNAL (1)...(22)
MNFKKTLLALALVLADSTAAASNNDPIVLVHGFAGWDRDELWGLYPHWGGTTDLQEELKKNGHDTVTAAVGPFSSTWDRAAELYYQLKGGCVDYGAAHAAQHGHARIGRCYNGNQPYVDAKRLPQWDTSHKIHLIAHSQGAPTVNMLVELLRNGSVAERAASGSTVGELYLGGKDWVRSITTVAGANNGTTFGKLTGFNEFAKQLLKAVGAIAGLGGNPEDLPYDFKLDQWGLKKGSNETQQQYWDRVWASPIWHSQDVGLYTLSPEGAAAERTWVKTSPNVYYFSYTNGTTLPGLITGNHYADPTTNLPLVPFANGMGAYRAYGDNWRQNDGVVNTISMKAPFGAPVVEYNGNPQKGKWNHMGFSQQDHWEVIGSGDVAGNLFYNWRLVSFYVNQANLLKQLD

SEQ ID NO: 423 - DNA, 1851 bp, Unknown
  Obtained from environmental sample
atggcagtgtttgactacaaggatgtgggttccagcgcatctacggcacttttcaaggatgcaatggcaatcacgctttacagctatcacaacctcgacaacggttttgccgtgggttaccagcaacacggtctcggcacaggtttgcctgccacactggtcaaggccgtactgggcggcaccgattctcagggggtagtgccggggattccctggaacccggactcggagaaacttgcccgtgaagcggtggaaaaagccgggtggacccccatcagcgccgagcaattgggatacgcgggcaaggtcgatcagcgtgggacatttttcggcgaaaaggcaggttatggcagcgcccaagtggaaatcctcggtaaatacgccgccgatggtcatttgacgtctatcggtatcggttttcgtggcaccagcgggccgcgtgagtcgttgattacggactccatcggcgatgcaatcagcgatttactagcggccatcgggcctgcggactacgccaaaaactacagcgccaacgcctttgacgcgctgctcggcaaagtggctgcctttgccagtgctcaagggttgaacggcaaggatgtgctggtcagcggccatagcctgggtggtctggcagtcaatagcctggcagacctgagtggcgatcactggtcggggttttatcgggatgccaagtacatcgcgtttgcgtcacccacacaaagcgaaaccacgtccaatgtgttgaatatcggttacgaaaacgacccggtgttccgcgccctggatggctcggatttcaatctttcgtcgttgggtgtgcatgatgcgtatcagccgtccgccaccaacaatattgtcagtttcaacgatcactacgcttccaccgcgtggaacctgatgcccttttcaattgccaatatctcgacctggatcactcacttgcccagtggctatgaaagcgggatgacgcggattctcgactcggcgttttatgacctgacccacaaggactcgaccattgtggtcgccaatttgtccaacccgacgcgagaaaacacctgggttcaggacctcaatcgcaatgctgaaccccataagggcagcacttttatcattggcagcgacggcaacgatttgattcagggtggccgcggcaacgacttcctggaagggcgcgacggtaatgacaccttccgcgacagtggcggctacaacatcattctgggtggcaagggcgtcaacaccctggacctgcagcaatcgttgagtcgtgtggatgtggtcaatgatgggcagggcagcctgtatgttcgcgatgcccacggcgggatcagtattgcccgtgacatcagctttttaataaccgaagagcccgcctggctagggttgagccaccacgaggttaaccatcgggtggccgatgatggcttgtggtccggcaaagaccgcactgactacacccactcgatcaaggccgaaccgggcgacagcacgctcaaggcggttgaacagggcgattggctgctggggcagggcggtaacgatcatttgatcggtttgcagggcaacaatgtgtttattggtggtgccggcaatgacctgctggaggccgctggcggcaacaatacgttcgttttcagcgggcactttggcaacgacacgctgctgggctatcagcccaccgacacgttggtgtttttgggggttgagggtggccacgtcgccgactaccgggcccatgccagtgcatcagggcatgacacggtgctcagcttcggcagcgactcggtaactctggtcggtgtcgggctggcctccctggcgggcacggatattgtgattgcctga

SEQ ID NO: 424 - protein, 616 aa, Unknown
  Obtained from environmental sample
  DOMAIN (133)...(267): Lipase (class 3)
MAVFDYKDVGSSASTALFKDAMAITLYSYHNLDNGFAVGYQQHGLGTGLPATLVKAVLGGTDSQGVVPGIPWNPDSEKLAREAVEKAGWTPISAEQLGYAGKVDQRGTFFGEKAGYGSAQVEILGKYAADGHLTSIGIGFRGTSGPRESLITDSIGDAISDLLAAIGPADYAKNYSANAFDALLGKVAAFASAQGLNGKDVLVSGHSLGGLAVNSLADLSGDHWSGFYRDAKYIAFASPTQSETTSNVLNIGYENDPVFRALDGSDFNLSSLGVHDAYQPSATNNIVSFNDHYASTAWNLMPFSIANISTWITHLPSGYESGMTRILDSAFYDLTHKDSTIVVANLSNPTRENTWVQDLNRNAEPHKGSTFIIGSDGNDLIQGGRGNDFLEGRDGNDTFRDSGGYNIILGGKGVNTLDLQQSLSRVDVVNDGQGSLYVRDAHGGISIARDISFLITEEPAWLGLSHHEVNHRVADDGLWSGKDRTDYTHSIKAEPGDSTLKAVEQGDWLLGQGGNDHLIGLQGNNVFIGGAGNDLLEAAGGNNTFVFSGHFGNDTLLGYQPTDTLVFLGVEGGHVADYRAHASASGHDTVLSFGSDSVTLVGVGLASLAGTDIVIA

SEQ ID NO: 425 - DNA, 759 bp, Unknown
  Obtained from environmental sample
atgcgaggacttcgtgttctagtggccgcggtcgtgctggccacgacggtcttggtggcctggccgggctcgagcgcctcggccgcggccaagaacccggtggtggtcgtggcggggctctcgggccccggcatcgcctacgaaccgcttgcggcccggctgcgtagcgacggctaccaggcgttcgtctaccagcttcccggcctcggcttcggcgacatccaccagagcgcagctgcgctgtgcggctacgtcgaccaggtgcgagcccagaccggtgcggcgaaggtcgacctcgtcggtcactcggaggggggcctcgtctcgcgtgactgcgtcaagagcttcggcggtgcgcagaaggtcgacaaggtcatcaccctcgggacgccgaactacggaaccgtcgcggcgaacatcgcgaccttcttcacactcggaacctgcatcggcatcaccgcgtgcgtgcagatgacgaccggttcgacgttcctcaacacgctgaacgcgggcgacgacagcatcggcagcgtgcgctactggaactacgccacgaagctcgacgagctcgtgcagccctatcgcaactccttcctcaccgcgagtgacgggaacatcgtgaacgtcgcgatccaggaccagtgctggcttcgcgtggttggccacctgggcctgatcctcgacggcaccacctacagcggggtcaagcaggccctcgagggcgacaccacgccgcggttgaactgcttcgcgctctga

SEQ ID NO: 426 - protein, 252 aa, Unknown
  Obtained from environmental sample
  DOMAIN (31)...(225): Lipase (class 2)
MRGLRVLVAAVVLATTVLVAWPGSSASAAAKNPVVVVAGLSGPGIAYEPLAARLRSDGYQAFVYQLPGLGFGDIHQSAAALCGYVDQVRAQTGAAKVDLVGHSEGGLVSRDCVKSFGGAQKVDKVITLGTPNYGTVAANIATFFTLGTCIGITACVQMTTGSTFLNTLNAGDDSIGSVRYWNYATKLDELVQPYRNSFLTASDGNIVNVAIQDQCWLRVVGHLGLILDGTTYSGVKQALEGDTTPRLNCFAL

SEQ ID NO: 427 - DNA, 942 bp, Unknown
  Obtained from environmental sample
atgcagattcaccccgaaatggctgccgtgctggagcagttcaaggatgctccgcccatggattttgtggccactccggtccccgaaatccgcaagctcatggaccacatggccttcccgcctgccgacctgcccatgcatgaggtgcgtgagatcgacatccccgggggtgacggccagccgctcaagctgcgtctgtaccgtcccagcaccgcgcaggcagcgccggtcatggtctattttcacggtggtggctggtgcataggcacgctggaaacgcatgacaacctgtgccgccacctggcgcgcctgactggcatgaatcttgtgtcggtcgattaccgtctggctcccgagcatgtctttcccgccgcgctggacgacgcctatgccgccactcgctgggtggcgcagcatgcggccgagctgcattgcgatgcgcagcaactgatggtggcgggggacagcgcggggggcaatctggccattgccacctgcctgcgggcaaaagaagacggctggaaaggcatagcccagcaactgctgctctatccggtctgcgatgcgcatatggatgcgccatcgtatgcgctttatgggcagatgccgtttctcaccaccgaagccatggccgcgatgtggcgtcactatcaccccgccatgcctgcacacccgctggcttccatcatgcagtaccccgatctcgctggtttgccagcagcggtgctggtgactgcggaactggacatattgcgcgacgaaggagaggcctttggcctgcgcctgcatcaggccggagtgccggtggcctgcctgcgggctcaaggcatgttgcatgggtttgcaaatttcagcaccctggtgccggcggtggcaagcttgctcgaagaggcttgtgcagagctccaccaggtcaagtccttggggcttgctcagccttga

SEQ ID NO: 428 - protein, 313 aa, Unknown
  Obtained from environmental sample
MQIHPEMAAVLEQFKDAPPMDFVATPVPEIRKLMDHMAFPPADLPMHEVREIDIPGGDGQPLKLRLYRPSTAQAAPVMVYFHGGGWCIGTLETHDNLCRHLARLTGMNLVSVDYRLAPEHVFPAALDDAYAATRWVAQHAAELHCDAQQLMVAGDSAGGNLAIATCLRAKEDGWKGIAQQLLLYPVCDAHMDAPSYALYGQMPFLTTEAMAAMWRHYHPAMPAHPLASIMQYPDLAGLPAAVLVTAELDILRDEGEAFGLRLHQAGVPVACLRAQGMLHGFANFSTLVPAVASLLEEACAELHQVKSLGLAQP

SEQ ID NO: 429 - DNA, 1032 bp, Unknown
  Obtained from environmental sample
atgagcaaattcgcaatactctgggcgttgataacggcatacctgccggaacctgtgatgaaactggtatatttagggcggcgcgaaacgcttggggcacggacgcttgacgttaaagcccaagctgtcgggcggctggccaatgcaacaagacctgtcggggtgattccgacggtcgaggaaagccggaagatgacggataaagccgttagcctttttgatcagcccgcccccgaattattccgtaaaaaagacattcagattgacggggctgaagggcctattgatgcccgtatttacagcggccctgcaaaacatcgcccgcgaccaattctagtgtattttcacggcggtggctgggttcagggcaatctagacagccatgacggggtttgcggcaagctggcaaaatgggcgaactgcatcgttatctcggtcgattatcgtctagcgcccgaacacaaattcccaagtgcgccgcttgatgcgattgcggcctataaatgggtgtgcgccaacgcaacaaaccttggcggcgatcctgaacgtatcggggttggcggggacagtgcggggggtaatcttgccgccgttgtctgccagcaaaccgccatgaacggcgagcgcacaccagatctgcaagtcctgatctatccggcgctggatgcacgcatgatctcgacctcgatggaggaattgcgtgatgcctacatcctgccgaaatccagaatggagtatttcctcggcctatatacgcgtggccctgacgatatcgaggaccttaggatgtcgccaattctcagggataccgtcgcggatcaaccccaagcctgcattgtcacctgtgggtttgacccgctgcgcgacgacgggaacacctacgccgaacgcttaattgccgaggggatagacgttaaacatattcagtattccggccaaattcatgcatttgtaaatctgtgcaaagtaattccgcagggtaacgcatgtattcaggatatcgctaattggctgaaaaccgtctggcggtaa

SEQ ID NO: 430 - protein, 343 aa, Unknown
  Obtained from environmental sample
MSKFAILWALITAYLPEPVMKLVYLGRRETLGARTLDVKAQAVGRLANATRPVGVIPTVEESRKMTDKAVSLFDQPAPELFRKKDIQIDGAEGPIDARIYSGPAKHRPRPILVYFHGGGWVQGNLDSHDGVCGKLAKWANCIVISVDYRLAPEHKFPSAPLDAIAAYKWVCANATNLGGDPERIGVGGDSAGGNLAAVVCQQTAMNGERTPDLQVLIYPALDARMISTSMEELRDAYILPKSRMEYFLGLYTRGPDDIEDLRMSPILRDTVADQPQACIVTCGFDPLRDDGNTYAERLIAEGIDVKHIQYSGQIHAFVNLCKVIPQGNACIQDIANWLKTVWR

SEQ ID NO: 431 - DNA, 672 bp, Unknown
  Obtained from environmental sample
atggagtacgcgttgtacgtgcccaagagctatgacggcacaaagagtcttccactgatcgtcgccttgcacggactgttcagcactccgcgacaaattctgagctatccgggctttacgcggcatgccgaccagcatggctacttacttgtcgcgcccatgggatacaacacgcgcggctggtatggcagtcgcggcaaaggaggcggtggcggcaccgacccggaaaacctgggcgagctgagcgagaaggacgtcatgaacgtcttggaacgggtccgcgagcagttcaagatcgacgacaatcgcatctttctcttggggcactcgatgggtggcggcggcgcgttgcacttggcgatacagcaccccgacatctgggccgcaattgcgccgatcgctcccgccgtaccacgcgatgccgctgagctggaacgggccaagcacattccggcgatcgtcgtgcaaggagaccaggatgggctcgtacacggcactcggcgttgggtcgagaaaatgaaagaactcggtatggaacatcgatacatcgaggtcaaaggcggcggccacatcttcgtcgcctttcagcacttcgacgagattttcggcttcttcaacgctcatcccaaagataaacgggaaatggcgaaacccgcggactccgcgcaatag

SEQ ID NO: 432 - protein, 223 aa, Unknown
  Obtained from environmental sample
  DOMAIN (1)...(205): Putative esterase
MEYALYVPKSYDGTKSLPLIVALHGLFSTPRQILSYPGFTRHADQHGYLLVAPMGYNTRGWYGSRGKGGGGGTDPENLGELSEKDVMNVLERVREQFKIDDNRIFLLGHSMGGGGALHLAIQHPDIWAAIAPIAPAVPRDAAELERAKHIPAIVVQGDQDGLVHGTRRWVEKMKELGMEHRYIEVKGGGHIFVAFQHFDEIFGFFNAHPKDKREMAKPADSAQ

SEQ ID NO: 433 - DNA, 750 bp, Unknown
  Obtained from environmental sample
atgagagttgtacaacccaaaccttttacttttgaaaaaggtccgcgggccgttttattattgcatggttttacggggcattctgccgatgtacggatgctcggacgctttttggaagaaagaaactatacatgccatgcaccaatctatcgtggacatggtgttgcaccagaggaattaataaagacaaaccccaatcagtggtgggaagacgttgaggaagcgtttaaccatttaaaagaacgcggttatgaggaaattgcagtagcgggtctttcacttggaggggtttttagtttgaaacttgcttatacgagacctgtaaaagcagttattcccatgagtacaccgatgtttttcgacaatgaagaacaattaacaaatggatttcattactttacaagacaatataaaaggttagaaggaaaatcaaaagaggaagtcgaggaggaaacaagagcggtcatggaagattccggaacgatattcaatcaggtggctgattacattgctgatgtgaggtcccatgtggatttaatttatacgccggcgatggtcgttcaggcgggaaaagatcaaatgatcaataaggacagtgcaacttatatctacgaacacctggaatcagataaaaaagaaataaaatggtatgaggaatcaggacatgtcattacgatcgataaagaaaaggaacagctttttgaagatatctatcaatttttagagtctttagattggaaatcatcgtaa

SEQ ID NO: 434 - protein, 249 aa, Unknown
  Obtained from environmental sample
MRVVQPKPFTFEKGPRAVLLLHGFTGHSADVRMLGRFLEERNYTCHAPIYRGHGVAPEELIKTNPNQWWEDVEEAFNHLKERGYEEIAVAGLSLGGVFSLKLAYTRPVKAVIPMSTPMFFDNEEQLTNGFHYFTRQYKRLEGKSKEEVEEETRAVMEDSGTIFNQVADYIADVRSHVDLIYTPAMVVQAGKDQMINKDSATYIYEHLESDKKEIKWYEESGHVITIDKEKEQLFEDIYQFLESLDWKSS

SEQ ID NO: 435 - DNA, 957 bp, Unknown
  Obtained from environmental sample
atgaaccccatcgaccgcagccgcagcctgttcacccaggccactggcgccgcccggcagaccgctgagacgaccctcaagaaccccctcgggaaggtcgtcgacctggccaagggtgggctggcggacctgcctcgcaacctgcagatgggcctggacgtgttccagtccgcccacctcaacgagctgaagaagctgttcggcgatggcagcgccaagccggaccgcatgtatgacgggcagttcgtgggcacccagggccagacgttcccgcctggcaccccgctggcgatgattccgggcgtcactccgaagaacaaccccaacccctcggagaccatcctctacgtcaacggcatcatgacgcccaaggagggccagctcagcgagatgcagtccatcgccgacacgtccggggcgaaggtggttggcatccacaactccacccagggcctggtggccgacctggcccagtgcgtgggcgacaagctggacaagggcagcaaccccgccgtggacacgctggccgacacgctctactcggagctgaaggcgggccgctcggtgcacctgatgggctacagccagggcggcctcatcaccgcccgcgcgctgttcgacgtcgagaaccggctgcgcatcgaggacgggatgtccaagacgcaggtggagcaggcgatgagcaagctcaaggtggagaccttcggggccgcctcgacgcgctacccagacggcccgcagtacgtgcactacgtcaacaacgccgacgcggtgcccaccctcaccggcctgggcggcagcgtggacccggccgccttcctgaaggacgcgggcaagggcgccgtggtgcaccgcttcaccgacggcaacctcaaccccatcagcaaccacatgctggacaccatgtacatgaagcaccgggtgcccttcgagcaggcgcgcgagaaccgcttctaa

SEQ ID NO: 436 - protein, 318 aa, Unknown
  Obtained from environmental sample
MNPIDRSRSLFTQATGAARQTAETTLKNPLGKVVDLAKGGLADLPRNLQMGLDVFQSAHLNELKKLFGDGSAKPDRMYDGQFVGTQGQTFPPGTPLAMIPGVTPKNNPNPSETILYVNGIMTPKEGQLSEMQSIADTSGAKVVGIHNSTQGLVADLAQCVGDKLDKGSNPAVDTLADTLYSELKAGRSVHLMGYSQGGLITARALFDVENRLRIEDGMSKTQVEQAMSKLKVETFGAASTRYPDGPQYVHYVNNADAVPTLTGLGGSVDPAAFLKDAGKGAVVHRFTDGNLNPISNHMLDTMYMKHRVPFEQARENRF

SEQ ID NO: 437 - DNA, 2082 bp, Unknown
  Obtained from environmental sample
  misc_feature (1867)...(1869): n = A,T,C or G
atgtgcacagctacgcacgacgagcggtcgttcgtggcggcgctggagagtgacgtgccgttcgacgtcatccttgccgactacaagctcccgcagttcaacaagctcccgcagttcgatggtgaacgggcccggcagttggcggccgccgcccggccggacgtgccggtcgtgttcgtcagcgtggcgctcggggacggactggcggcggcggccgtgcgcgacgggatggccgactacgtgggcaaggcgcatctcggcgcgctgcccgcggcggtgaggcgggccgtgcgggccggccgcgagcgggcccgccggcgggaggtcgagcgggcggcggcgacgaccgcggcgcagttccggtcgctcgtcgagcacgtccgcgggacggccatctacctgatcgacaacgacggcgtcatccggtcgtggaaccgtggggccgaggcgatgaaggggttcaccgccgacgaggcgatcgggatgccgttcgagcagttgttcctccccgccgaccgggcggccggggagccgcggcggcagttggagatcgcggccgctaagggggagtaccgcagcaccggccgccggcggcggaaggacggcccgccgttcgacgccgagctcgtgctgactgcgctccgcgaccccggcggttcgccccgcgggttcctcaagatcgtccacgacgtgaccgaccgactccggcgcgagcgggagcgggaggagctgctggcggccgagcaggcggcgcgggcgcgggccgaggcgatggccgaggaggcccgggcgtcggccgaggaggccgagcgggccgggcggatgaaggacgagttcctggcgacgctcgggcacgagctgcggacgccgttgaacgcgatcctcgggtgggcgcaggtgctgagccgcggcggcgccgtcggcccggacgccgccgccgggctcgccgcgatcgagcggaacgcccgggcgcaggcccagatcatcgaggacctgctggacatgagccggatcatctccgggaaggtccggctcgacgtccgcccggcggacgtgtcggcagcggtgcgggcggcggccgacacctgccgccccgccgccgacgccaagggcgtccggctcaacgccgtcatcgacccgggccccggcctcgtcagcggcgacccggaccggctccagcaggtgttctggaacctgctcagcaacgcggtgaagttcacgccccgcggcggctgcgtgcaggtcgtcgtcgggcgggtcgactcgcacgtggaggtcgcgatctccgataccggcgagggcatccgcgccgagttcctcccgcacgtgttcgaccggttccgccaggcggacgggtcgaccacgcggcggcacggcgggctggggctggggctgtcgatcgtcaagaacctggtcgagctgcacggcgggtcggtccgggccgagagcgccgggcacggcaccggcgcgacgttcgtcgtcagcctgccgctggccgccgtccgccccgccccgtcggtcggtcccgacggcgacggcgagctggcgcggccgtccactgtccatgcccggctgccggggatggccgagctgtccgaccggctcgccggcgtgcgcgtggtcgtggtggacgacgagcccgacgcccgggcgctgctgcggcgggtgctggaggactgcggcgcggtggtgtcggcggccgggtcggcggccgaggcgctggcgtgcgtgacggccgatccgccggacgtgctggtcagcgacatcggcatgccggacgaggacgggtacgccctgattggaaaggtccggtcgctcgcgccgggggcgggcggggacgggtacgccctgattggaaaggtccggnnncccttcgtgggcgatcctcaggccttgtccgccgccagcagcttcaccgccgcgtccttgactcgggcgtggtccttctcctccacgttcgtcagcagcggcgccagcggccccgtgttggcgatgccggccagccgcaccgcctcgtgcagcacccggatcgggttgatgttgttccgcaggtcctcgagcgggaagaagatctggcggatc

SEQ ID NO: 438 - protein, 694 aa, Unknown
  Obtained from environmental sample
  DOMAIN (538)...(640): Response regulator receiver domain
  DOMAIN (387)...(499): Histidine kinase-, DNA gyrase B-, and HSP90-like ATPase
  DOMAIN (275)...(341): His Kinase A (phosphoacceptor) domain
  DOMAIN (192)...(234): PAC motif
  DOMAIN (118)...(181): PAS domain
  VARIANT (623): Xaa = Any Amino Acid
MCTATHDERSFVAALESDVPFDVILADYKLPQFNKLPQFDGERARQLAAAARPDVPVVFVSVALGDGLAAAAVRDGMADYVGKAHLGALPAAVRRAVRAGRERARRREVERAAATTAAQFRSLVEHVRGTAIYLIDNDGVIRSWNRGAEAMKGFTADEAIGMPFEQLFLPADRAAGEPRRQLEIAAAKGEYRSTGRRRRKDGPPFDAELVLTALRDPGGSPRGFLKIVHDVTDRLRREREREELLAAEQAARARAEAMAEEARASAEEAERAGRMKDEFLATLGHELRTPLNAILGWAQVLSRGGAVGPDAAAGLAAIERNARAQAQIIEDLLDMSRIISGKVRLDVRPADVSAAVRAAADTCRPAADAKGVRLNAVIDPGPGLVSGDPDRLQQVFWNLLSNAVKFTPRGGCVQVVVGRVDSHVEVAISDTGEGIRAEFLPHVFDRFRQADGSTTRRHGGLGLGLSIVKNLVELHGGSVRAESAGHGTGATFVVSLPLAAVRPAPSVGPDGDGELARPSTVHARLPGMAELSDRLAGVRVVVVDDEPDARALLRRVLEDCGAVVSAAGSAAEALACVTADPPDVLVSDIGMPDEDGYALIGKVRSLAPGAGGDGYALIGKVRXPFVGDPQALSAASSFTAASLTRAWSFSSTFVSSGASGPVLAMPASRTASCSTRIGLMLFRRSSSGKKIWRI

SEQ ID NO: 439 - DNA, 918 bp, Unknown
  Obtained from environmental sample
atgcagcgtattgctgatcagatgaaacgtgcaggtcataaacccatgtatgagctttcaccgcagcaggcgcgggaatactatgagcgcaatgccagtattttggatttgccagcagcatcgttgccgcgtgtagagaatttttatattccatcaacagatggcgagttattgccggccagattgtatgcaccgtcagaagagaagggcttgcctgttctcttgttttttcatgggggtgggtttaccgttggcagtattgacacgcacgatagtctgtgccgccagcttgcgttgctcagtggtgttgccgtggtgtcgctggattaccggctggcaccggaatataaattcccggttgcagtggatgacgcatgggcggcctgccagtggctgaaccagaatgggcagactctggggctggatggtttccggctggctgtcgggggcgatagtgccgggggaaccttggccgccgtgtgtgccattatggcacgcgatgcgcagttgcctgtggcattgcaggtgctgttttacccgggcactacagcacaccaggataccgagtcgcacacggtgtatgccgataacgcgattattcctgaagtgctgattacctggttcttccaccagtatattgaagatgggcagcgtgaagactggcgctttgcaccgctgttgtgtgacgacttgcaaggtgttgcacccgcctggatgggactggcggaatgtgacccgttggtggatgaaggtgtcgcatatgctgaccggctgcgttttgccggagtgccggtggaactggagctctataaaggtgtgacgcacgagtttgccaaattcgggcaggcgataccggaagccctggcagcccagaaagctgcggcacaggcattggcacaggtatttgatgtggtttaa

SEQ ID NO: 440 - protein, 305 aa, Unknown
  Obtained from environmental sample
MQRIADQMKRAGHKPMYELSPQQAREYYERNASILDLPAASLPRVENFYIPSTDGELLPARLYAPSEEKGLPVLLFFHGGGFTVGSIDTHDSLCRQLALLSGVAVVSLDYRLAPEYKFPVAVDDAWAACQWLNQNGQTLGLDGFRLAVGGDSAGGTLAAVCAIMARDAQLPVALQVLFYPGTTAHQDTESHTVYADNAIIPEVLITWFFHQYIEDGQREDWRFAPLLCDDLQGVAPAWMGLAECDPLVDEGVAYADRLRFAGVPVELELYKGVTHEFAKFGQAIPEALAAQKAAAQALAQVFDVV

SEQ ID NO: 441 - DNA, 639 bp, Unknown
  Obtained from environmental sample
atgaaaaaagtctattttataagcggccttggtgcagataaaagagcattttcatttcttgatttatcgttttgcgaccccatttttattgaatggataaaaccattaaagaacgaatctcttcagggatatgcattacgacttaaagagcaaataaaagagcctggtgcagttatcattggcgtttcttttggtggaatgcttgccacggaaattgcaaaaactgacttcgctacgaaagttattatcatctcaagtaataaaattaaaaaagagtttcctaaaattttcctgaccggaaaatacctgccggtttataaatggctcccctcagccttattaaaaaaaggaacaattatccgcagcaagttctttagtccaaaaggagaaatgcagaagaaaatttttcagcagatattaaatgatactgacacaaaatttacaaaatgggcaatttattcaattcttcattggcaaaacgaagtaatccccgataacgtaattcacattcatggcacatcagacaatttactcccctatcgtttagtaaaagcagattacaccataaaaaatggcacacacctgatgataatgaaccagtataaagaaatttcggaactgctgaaaaaactaatctaa

SEQ ID NO: 442 - protein, 212 aa, Unknown
  Obtained from environmental sample
MKKVYFISGLGADKRAFSFLDLSFCDPIFIEWIKPLKNESLQGYALRLKEQIKEPGAVIIGVSFGGMLATEIAKTDFATKVIIISSNKIKKEFPKIFLTGKYLPVYKWLPSALLKKGTIIRSKFFSPKGEMQKKIFQQILNDTDTKFTKWAIYSILHWQNEVIPDNVIHIHGTSDNLLPYRLVKADYTIKNGTHLMIMNQYKEISELLKKLI

SEQ ID NO: 443 - DNA, 1014 bp, Unknown
  Obtained from environmental sample
gtgacttctcctgatcgctctgccctgcgaccagagatcaccgagttcctcgaagagcttgacgcggctggcggaagtttcgccgagctggctcccgatgaggtgcgtccggtagtcgaggagctgtgccgccagttgtggggcgagagagtcgctgttctaaccgttgccgacatcgaggttcctggatctggcgcgcagatccccgctcgaatctatgcaccccaaagtcccgggcctcacccgggtgtcgtcttctttcacggtggcggttgggtgataggaagcatcaacacacacgatggggcctgtagaaggctcgctgaactgctggggtgtttagtcgtgtcggtccagtatcggaaggcacccgaattccagttcccgatcccgctggaagacgcttgggaagcaacaaagtgggtcttcagcaacgcggcacgcctcgacatagacccagctcgaatctcggtggtaggtgagagtgccggaggaaacctggcagccgtggttgcccggcgggcacgggaccatggcctctccctcaactcacaggtgctggtctacccggtaaccgactcagtcaccgacaacggctcctatgagaagaacgcgaccggattcaacctgaccaaggagcaaatggagtggttcatcggccactatgcccgtggccccgaagacctggttgaccccgacttctcgccgctgcgggcctcggacctaagaggcatggcaccggcatacattctcacggtcgaggccgacccgctacacgacgaaggagttgcctatgcggccgccttgtcttcggcaggagtcgacgtgacccacgaagacctcaccgatgtggtccacggcttcttcataatgaacgcaatcacacctgccacggacgagactatccgtcgcgtcgccgactacctgaaggcgatgtggtctcgacaaccctcatcggcggcgacgctgatcaattcgagcagcgacgacacgtcgagttcgccgaccgggtga

SEQ ID NO: 444 - protein, 337 aa, Unknown
  Obtained from environmental sample
MTSPDRSALRPEITEFLEELDAAGGSFAELAPDEVRPVVEELCRQLWGERVAVLTVADIEVPGSGAQIPARIYAPQSPGPHPGVVFFHGGGWVIGSINTHDGACRRLAELLGCLVVSVQYRKAPEFQFPIPLEDAWEATKWVFSNAARLDIDPARISVVGESAGGNLAAVVARRARDHGLSLNSQVLVYPVTDSVTDNGSYEKNATGFNLTKEQMEWFIGHYARGPEDLVDPDFSPLRASDLRGMAPAYILTVEADPLHDEGVAYAAALSSAGVDVTHEDLTDVVHGFFIMNAITPATDETIRRVADYLKAMWSRQPSSAATLINSSSDDTSSSPTG

SEQ ID NO: 445 - DNA, 429 bp, Unknown
  Obtained from environmental sample
atgaacacacccgcagtttcgttaggatacgtgattctttttgtccgcgacgtctcggcgagcctgacattctacgagcaggcgttcggactctcccggcgattcttcaacgacgacaacggcaaggcctatggcgagctggactccggcgccgcctgtctggcgtttgccaatttcgaaatggccaaggcgcaactgcagcaggaagtcgtatttgcctccccggacaaaccgccgctcggtgtggaggtcgcgctcgttaccgccgatgtgcccgagctttatgcccgcgccttgaaatccggagcgccttccatgcgcccaccggcaaccatgccgtggggacaaaccatcgcctacgtccgggacatcgacggtcacctgatcgagctgtgcacgcccgtagctcccccgccgccagccccgtaa

SEQ ID NO: 446 - protein, 142 aa, Unknown
  Obtained from environmental sample
  DOMAIN (7)...(131): Glyoxalase/Bleomycin resistance protein/Dioxygenase superfamily
MNTPAVSLGYVILFVRDVSASLTFYEQAFGLSRRFFNDDNGKAYGELDSGAACLAFANFEMAKAQLQQEVVFASPDKPPLGVEVALVTADVPELYARALKSGAPSMRPPATMPWGQTIAYVRDIDGHLIELCTPVAPPPPAP

SEQ ID NO: 447 - DNA, 876 bp, Unknown
  Obtained from environmental sample
atgtcttgtgatttttatcaacaaatacgccaacagttggatgatgttaaaaccgaagggctctataaatctgaacgcgtgatcacctcacagcaacaagcggcggtgtctatctcaaccggtcaagaagtgcttaacttttgcgccaataattatcttggtttagctaatcatcctgctttgatcgaagcgggccagcaaggtatggcaacccatggtttcgggatggcttcggtacgttttatctgtggtacgcaagatatccataagcagcttgaagagaagctgtctgctttccttggcaaagaagacaccattctttatacctcgtgctttgatgcgaataccgggttatttgaaactttgcttgataaagaagatgccatcatctctgatgcgctcaatcacgcttcgatcattgatggcgttcgtttatgtaaagcgatgcgttttcgttatagcaataacaacatgcaagagttggagcagcagctgattgctgctgatcaagcgggcgcacgccataagctgattgtcacagatggtgttttctctatggacggcgtagtggcgaacttgccagcgatttgtgatttagcagacaaataccatgctttggtgatggtagatgattcccatgcggtgggctttatgggcgcaaatggccgtggtacgcatgaatatcataacgttatcgacagaattgatattattaccggaacgctaggcaaagccatgggcggcgcttctggtggttatacctcaggtaaaaaagaagtgattgattggttacgtcagcgctcacgtccttatctcttctcaaactcggtcgcaccagcaattgtacgtgtgtattttcgtaattatgggtcttaa

SEQ ID NO: 448 - protein, 291 aa, Unknown
  Obtained from environmental sample
  DOMAIN (74)...(291): Aminotransferase class I and II
MSCDFYQQIRQQLDDVKTEGLYKSERVITSQQQAAVSISTGQEVLNFCANNYLGLANHPALIEAGQQGMATHGFGMASVRFICGTQDIHKQLEEKLSAFLGKEDTILYTSCFDANTGLFETLLDKEDAIISDALNHASIIDGVRLCKAMRFRYSNNNMQELEQQLIAADQAGARHKLIVTDGVFSMDGVVANLPAICDLADKYHALVMVDDSHAVGFMGANGRGTHEYHNVIDRIDIITGTLGKAMGGASGGYTSGKKEVIDWLRQRSRPYLFSNSVAPAIVRVYFRNYGS

SEQ ID NO: 449 - DNA, 999 bp, Unknown
  Obtained from environmental sample
atgaaattactgcgtgtctttgtgtgcgtttttgctttactcagcgcacacagcaaagccgatacacttaaagtaatggcttataatattatgcaactaaacgtacaagattgggatcaagcaaatcgtgcacagcgcttgccaaacgtcatatctcaattaagtgacagtcctgatgtcattcttatcagcgaagcgtttagcagccaatcagaatctgcgttagcgcaacttgctcaactttacccttatcaaactcccaatgttggcgaagactgtagtggcgctggctggcaaagcttaacgggtaactgctcgaatagcccctttgtgatccgcggtggagtggtgattttatctaagtaccccatcattacgcaaaaagcccatgtgtttaataacagcctgactgatagttgggattatttagcaaacaaaggtttcgcttatgttgaaatagaaaaacatggcaaacgttaccaccttattggcacgcatttacaagcaacgcatgatggcgacacagaagctgagcatattgtgagaatgggtcaattacaagagatacaagatttcattcaaagcgagcaaattcacacttctgagccggtcattatcggcggtgatatgaacgtagagtggagcaagcaatctgaaattacagatatgctcgaagtggttcgcagccgtctaattttcaacacacctgaagttggctctttctctgcaaaacacaactggtttaccaaagctaacgcctactatttcgactacagcttagagtataacgacacgctcgattatgtactttggcatgcagaccataagcaacccaccaataccccagaaatgttagtacgttacccaaaagcagagcgtgacttttactggcgttacttacgcggaaattggaacttaccttctggccgttattatcatgatggatactataacgaactgtctgatcactacccagtgcaagttaactttgaattttaa

SEQ ID NO: 450 - protein, 332 aa, Unknown
  Obtained from environmental sample
  SIGNAL (1)...(20)
  DOMAIN (23)...(330): Endonuclease/Exonuclease/phosphatase family
MKLLRVFVCVFALLSAHSKADTLKVMAYNIMQLNVQDWDQANRAQRLPNVISQLSDSPDVILISEAFSSQSESALAQLAQLYPYQTPNVGEDCSGAGWQSLTGNCSNSPFVIRGGVVILSKYPIITQKAHVFNNSLTDSWDYLANKGFAYVEIEKHGKRYHLIGTHLQATHDGDTEAEHIVRMGQLQEIQDFIQSEQIHTSEPVIIGGDMNVEWSKQSEITDMLEVVRSRLIFNTPEVGSFSAKHNWFTKANAYYFDYSLEYNDTLDYVLWHADHKQPTNTPEMLVRYPKAERDFYWRYLRGNWNLPSGRYYHDGYYNELSDHYPVQVNFEF

SEQ ID NO: 451 - DNA, 2772 bp, Unknown
  Obtained from environmental sample
atgcagtttagaaacttaagaatcaaaatcgttactgccattatcagcctgtttattttattggtttgcgtgtgttttacattaccagggcagaaattactggtttgggtagccaataaaacggtttcaggtctgcaaattgagagtatcgacaaacgaatattatctggtgctaaccttacgttacggtatgaaaatgacgatatcgcgatccgcctgcgaaacactcaggtgaacgtagaatggctaacgtgtgccagtatttgtatctccatggatgcgaacacgattgccatagtacaaaagcgcgaaggttcccgtgaagccaacgacgaagcgtccggcccaatagtgctgccgttaccagtggcgataaaacaggcaagaatccagcggctatcttttgaaacgcctaccattacagtgaatttgaaagcacttaatatgcaggttgctgggtctgattctcactttcaagtgccacaattatcgctagatacactgcagctgacgaccaaggctacgacgccgccggcatcggccaagtcgtcggtgtcacttgatgagttagcgcctttgcagctgcccaatattagtttgccactgacagctgaggtgggtgatctaaccattgataccttgtcgttggatgagcaaacgctcaacaatattaaacttgctcatgtggtgctagacaaaaacattacagttgaaaacgctcagcttaattatcaatcctactttttatccacggcagctgatgttgcactcgaaagttggactgttgatttgcgagccaccttaagtgcgccagtgggcttggccaattttaacttaactgggcagccaagcgagcttttgttgcgagtgaacacacaaggcatggcgtttgcaacacttcaggccgaggttgacttaacacgtcagaactggccatttgaggtgcaagggcaaatagataaaatggtgtcaccgtcacaacctgtaaggttaaacaatgcgaacttaacgctgcaaggcgatgcttcgaactacagtttgtctagtgcattgtctttatactcccgccagtttggtgacataacctcagcactcagcggacaaggagggcttcaagcgtttaccttggacaaagcggagctggcactggagcaggcaaaagctcagctcaatgggcaagttaattggtctaaaggggtaaaagggcaactcgctggtgatttttcaaagcttccaattgataggctgctgggcatattacaatacgacgctgggttaacagcaagcgatatgttgggcggacagtttgcgctgggctttgctagtgaacaacagcagtggcagcttgatatagatagttttacgcttgcaggaaaagtggcaggaacgccattgaatgcagacgtgaaagtgaaggtggatgaacgtctactcggtgagctgagccatgctcgcgtgaattacggaaagaacactctatcggtaagcggagcgctcggtcagaccttagatttagatgttgattttcagcttgatcaaaccgctaatgcattaattccagcagatgttaaaggccacggtgaagtctttattcagggcaaccatctgcaacctgtcatccaaacgaatgtacaaattgagtcagtgcgataccaagatatgctactgcaagggttatccactcatggcaaagtcgatattgctaattcagtgacgggacaagttggggtggcactggacaaggtggtgttcaattcagaaaccgttgaagatattcgcctcagcgctaaaggagatcaacaaaaccatacggtgacccttgatgttcgtgataagcgagcaattgcgagtattactgtcaatggcaaagttcagcaggctaaatggcatggcgaattaaccgcaggtgagctgacctcacaaggccgaacgctagcactgagagagcctgcagcaataatcctagggaaacaaactcaacaacttgcgcagcagtgttggcaaatggatagcactaatttgtgtttttcagcaaaacaagagggtttacagggacaagcagagttcagcttagacaagttagcgctcgaacagctacaaagctggttacctcaaacgttaaaagtccaaggtgaaacgaaggcaaatgcaaccttagcctggaacaaaggaaaagtgactcaagctaatggtcaactggaggtcattgaggctggagttacaactcatggccaaacgtttactatttctgagtttaaggccttactcaacaccgataacaaacagttgcacgctgattggcatatgaactcggataccttagggcgctttagcggcgatacccaaataccgttgaacaagcaagtccctgagctgttgggcaatattcaaattgagtcgattgaactggctaagttatcggcacttcttaatcgggtgacagagcaaagttttgatctacaaggaaacgtgcagggagacatcaaactttctgggagcttggctgcgcctgaggttaacggtaaagtaaccgctcagcgtttatttttggcgtcagattcattacctgttgaagtggactcaggccatatcaatgtgaattttaataccacatcggctcaacttgaagcgcagctgaacgccgctcgaggcggaaatgtggcgcttacaggggaagcgaattgggcgtcaggtgtagcggctgaggttaaaataaaaggggagaatatctatgtacaacccgactcgcaaattgagttaaccgcaagccca

SEQ ID NO: 452 - protein, 924 aa, Unknown
  Obtained from environmental sample
MQFRNLRIKIVTAIISLFILLVCVCFTLPGQKLLVWVANKTVSGLQIESIDKRILSGANLTLRYENDDIAIRLRNTQVNVEWLTCASICISMDANTIAIVQKREGSREANDEASGPIVLPLPVAIKQARIQRLSFETPTITVNLKALNMQVAGSDSHFQVPQLSLDTLQLTTKATTPPASAKSSVSLDELAPLQLPNISLPLTAEVGDLTIDTLSLDEQTLNNIKLAHVVLDKNITVENAQLNYQSYFLSTAADVALESWTVDLRATLSAPVGLANFNLTGQPSELLLRVNTQGMAFATLQAEVDLTRQNWPFEVQGQIDKMVSPSQPVRLNNANLTLQGDASNYSLSSALSLYSRQFGDITSALSGQGGLQAFTLDKAELALEQAKAQLNGQVNWSKGVKGQLAGDFSKLPIDRLLGILQYDAGLTASDMLGGQFALGFASEQQQWQLDIDSFTLAGKVAGTPLNADVKVKVDERLLGELSHARVNYGKNTLSVSGALGQTLDLDVDFQLDQTANALIPADVKGHGEVFIQGNHLQPVIQTNVQIESVRYQDMLLQGLSTHGKVDIANSVTGQVGVALDKVVFNSETVEDIRLSAKGDQQNHTVTLDVRDKRAIASITVNGKVQQAKWHGELTAGELTSQGRTLALREPAAIILGKQTQQLAQQCWQMDSTNLCFSAKQEGLQGQAEFSLDKLALEQLQSWLPQTLKVQGETKANATLAWNKGKVTQANGQLEVIEAGVTTHGQTFTISEFKALLNTDNKQLHADWHMNSDTLGRFSGDTQIPLNKQVPELLGNIQIESIELAKLSALLNRVTEQSFDLQGNVQGDIKLSGSLAAPEVNGKVTAQRLFLASDSLPVEVDSGHINVNFNTTSAQLEAQLNAARGGNVALTGEANWASGVAAEVKIKGENIYVQPDSQIELTASP

SEQ ID NO: 453 - DNA, 1347 bp, Unknown
  Obtained from environmental sample
atgaaagatctggcacagcagcaagtaggaaaagtcctggcacaaaccgccctggcgctggcggccctggtgggagcaacggcggcgcaggcatccaacaacgacccggtggtgctggtgcatggcttcctgggcttcggcccggacgaattgcagggcagcggcttctcctactggggcggcttcaacgacgtcgccgcccacatgcgcgaaggtaaccatcaagtgtttgccgccggcgtcgggccggtcagttccaactgggaccgcgcggtcgagctgtattaccagatcaagggcggctgcgccgactatggcgcgctgcacacggcgcaatacgcggcgttcggcgcgatccagaaaccggccggcaaatgctgggccgccgatccgaacaacaatcccaacaactacccgctggcgctctacccggcctgggacgccagccatccgctgcacctggtctcgcacagccagggcggccaaaccatccgcaccctgatccagctgatggaaaacggttcgccgaacggcaatgaaggcgacggcgcactatatgcgggcggcaagatcggctggatcaaaagcgccaccaccatctccacgccgcacaacggcaccacgctgcgcgacgtgatcgtcgatttcgtgcccaaggtatcggagctggccggccagatcgtccaggtggcgggattgggcggcagcaccagccccatctacaagttccggctggagcagttcggcctggcgcaaggtccggccgaatcgctgcaggacttcatcaaccgcaccaagggcgcgccgttctggtcgctgaacaaccatgacgcggcgcaatgggacctgggcccggacggcgcgcgcgagctcaacggctgggtcaagacctcgccccacgtctactactattcgatcggcagcaacgccaccgaacagggcagctggtgctgcaacggcaccgaccgcgtgatcgcaccgttccagagttccagctatcagtatgcgcgcaccgacatgatcttcttcctcaagaacacggccggcgaatgggtggtgccatcgatcctgcagcgcggcatgggctcttacacgcagaccgatcctggccgcgtcatcgtcgacagcagctggttccccaacgacggcgtggtcaacacggccagcatgaaagcgccagccggccagccggtgcgcaactacgacggcaactccgtggtgggcagctggaactacctgggctactaccgcggctacgaccacttcgacgtgatcggctggctgcaaccgtccgatggcgtgtacccgatctacgatagcctgaccgggatactctacggcctgtaa

SEQ ID NO: 454 - protein, 448 aa, Unknown
  Obtained from environmental sample
  SIGNAL (1)...(31)
MKDLAQQQVGKVLAQTALALAALVGATAAQASNNDPVVLVHGFLGFGPDELQGSGFSYWGGFNDVAAHMREGNHQVFAAGVGPVSSNWDRAVELYYQIKGGCADYGALHTAQYAAFGAIQKPAGKCWAADPNNNPNNYPLALYPAWDASHPLHLVSHSQGGQTIRTLIQLMENGSPNGNEGDGALYAGGKIGWIKSATTISTPHNGTTLRDVIVDFVPKVSELAGQIVQVAGLGGSTSPIYKFRLEQFGLAQGPAESLQDFINRTKGAPFWSLNNHDAAQWDLGPDGARELNGWVKTSPHVYYYSIGSNATEQGSWCCNGTDRVIAPFQSSSYQYARTDMIFFLKNTAGEWVVPSILQRGMGSYTQTDPGRVIVDSSWFPNDGVVNTASMKAPAGQPVRNYDGNSVVGSWNYLGYYRGYDHFDVIGWLQPSDGVYPIYDSLTGILYGL

SEQ ID NO: 455 - DNA, 1239 bp, Bacteria
atgaggagatacgtaaaagtaatgctttctattttacttattattagtttattttggtcgcctcttgaattaaaagcagaggaacaaaatcaaaaagaaccgattgttcttattcatggtttaggtggttggggccgtgatgaattgtttggttttaagtattggggcggttttaaagatatcgagacaaatttgaaccgacaagggtatagaacatatacagcttcggttggaccattttcaagcaattgggatcgtgcagcagagttatattcgtatttaaaaggtggaacagttgattatggagaagcacatgcgaaagcgcatggacatgcccgttatggaaaaacatattcaggggtatatagccaatgggataatcaacataaagttcattttgtaggacatagcatgggtggtcagacggcaagggttttattgcaactattaaaggagggaagtttagaagaacgagagtattataaacaacatccagaggtaggaatatctccgttatttgaagggaataaagattgggtacggagtgtaacaagcattggtacgccacataacggttctacgtttgcggatgaagaaacgatgtcttcgtttattaaagaatttgtaataaagattgctagtttatcaggtaataatccggaaacatttggctatgactttaaattggaacaatggggattaaagcgaaaacaaggagagagcttcttgcaatatgcggatcgaatgcttaatagttctgtttggaaaagtaaagatattagtgcatacgatttaacgacagctggatctaaagagcttaatcgatgggtaaaaacatatgatgatgtatattatttttcttatacaggagatgcgacgtatcgttcattactgacgggatattctgtacctttgttgacgatgaatccactgatgtacttgtctggcttacatattggaaagtttacacgaggatatacagagccaagtattaatgaaaaatggtggccaaatgatggacttgttagtgttgtttcgtcacaatatccgataggacatcgaaatcagctgtatgcaggaaatgctcaaaaaggtgtctggaattataccgtgacaaaatataattgggatcatatcgattttattggaatcgatcttgcggatactttggggattagtgatatatattcgttttataatgaagtggctgggaatatttatcgtttacctttgaattag

SEQ ID NO: 456 - protein, 412 aa, Bacteria
  SIGNAL (1)...(25)
MRRYVKVMLSILLIISLFWSPLELKAEEQNQKEPIVLIHGLGGWGRDELFGFKYWGGFKDIETNLNRQGYRTYTASVGPFSSNWDRAAELYSYLKGGTVDYGEAHAKAHGHARYGKTYSGVYSQWDNQHKVHFVGHSMGGQTARVLLQLLKEGSLEEREYYKQHPEVGISPLFEGNKDWVRSVTSIGTPHNGSTFADEETMSSFIKEFVIKIASLSGNNPETFGYDFKLEQWGLKRKQGESFLQYADRMLNSSVWKSKDISAYDLTTAGSKELNRWVKTYDDVYYFSYTGDATYRSLLTGYSVPLLTMNPLMYLSGLHIGKFTRGYTEPSINEKWWPNDGLVSVVSSQYPIGHRNQLYAGNAQKGVWNYTVTKYNWDHIDFIGIDLADTLGISDIYSFYNEVAGNIYRLPLN

SEQ ID NO: 457 - DNA, 1194 bp, Unknown
  Obtained from environmental sample
atgaacacacgaagttttcgcaagtttgtgagcgctgtcggcgtcattgcgatcctgttctcggtgcaacaggtacaagcctatgacgagatcgtggagaagcaggtctttgagcttgcctcctacacgaccaccggcggggagacgatcaaggacgtccgtatcggctgggaggcctacgggacgttgaacgaggccaaggacaacgtcatcctgattacccacttctattccggcaacagccatgccgccggccgctacaccgccgagggtcctgccggctattggaacgccatcatcggttcaggaaagccgatcgataccgacaaatactacgtcgtgtcgtccgacaccttggtgaacctcggcgccaacgatcccaacgtcatcaccaccggtccggcttccatcaatcccgacaccggcaagccttacggcatgagctttcccgtggtgacgattcgcgacttcgtggaggttcagaaggctctgctcgacagccttggcatcgacaaactgcatgccgtcgttggggcctcaatgggcgccctgcaggcctatgaatgggcggcggcctatcccgagcgggtcgagcgcctcattccggtgatcggcagcggctgggccgacggcgacctgatcgcctggctcaacatctggtcggcgccgatcaagctcgaccccaactggaatggcggcgattactatgacggcgagccgccgctgcaggggcttgccgagtcgctcaagatcgtgacgttgcaggccaaccactggaaatggtccaacagcgtgttcggccgcgcctgggccaaggacggtgccgatccggcggcaagcttcgacaatctgttcaggatcgaggcggtgcttgacggggccggccaggcccgcgccaagaccagcgatgccaatcatttcctctacctcgccaaggccaatcagctgttctatgccggccacggcgaaaccctttatgaaggcctgcgggcgatcacggcgccgacgctgatcatccatagcgatgacgacctgctgttcccgcccgccgcgatccgcgaaaccgcagccatgatcagatcgggcggcgcgccggttgacgtggtcgggattcaggccggccgcggtcatctcgatggagtcctggcgatcagccaggccggcgcgcagatcgaggcattcctcgcgaggtga

SEQ ID NO: 458 - protein, 397 aa, Unknown
  Obtained from environmental sample
  SIGNAL (1)...(27)
  DOMAIN (68)...(393): alpha/beta hydrolase fold
MNTRSFRKFVSAVGVIAILFSVQQVQAYDEIVEKQVFELASYTTTGGETIKDVRIGWEAYGTLNEAKDNVILITHFYSGNSHAAGRYTAEGPAGYWNAIIGSGKPIDTDKYYVVSSDTLVNLGANDPNVITTGPASINPDTGKPYGMSFPVVTIRDFVEVQKALLDSLGIDKLHAVVGASMGALQAYEWAAAYPERVERLIPVIGSGWADGDLIAWLNIWSAPIKLDPNWNGGDYYDGEPPLQGLAESLKIVTLQANHWKWSNSVFGRAWAKDGADPAASFDNLFRIEAVLDGAGQARAKTSDANHFLYLAKANQLFYAGHGETLYEGLRAITAPTLIIHSDDDLLFPPAAIRETAAMIRSGGAPVDVVGIQAGRGHLDGVLAISQAGAQIEAFLAR

SEQ ID NO: 459 - DNA, 834 bp, Unknown
  Obtained from environmental sample
atgacctttcccatcatcttggcgcacggcgtctgccggtttgacgtggtgatcaacgacttccttcatcttgacaacaacgatgaccccacgctggaccggctgcactattttcgcggcattcgcaccatgctgaaggccaacgggttccacgtctaccactccaaagtcagctgggcggccgacgtgacaacccgggcggaggatttgcgacgcaacatcgaagcggtcttgaacaaggaggaggccgacaaggtcaacatcatcgcccacagcatggggggattggactcccgacacatgctgttcaatggaagagactccaaccggatccatgaacgggttgcgtcgctgaccacgatttcgaccccacacgagggatcccccttcgccgactggatgaccgaccatctgcctcgggtcatcccgaccgcaagacagcttggactggatctgaaagcgctcagcgacctgcgcacagaccaatgcaaggcgttcaacgaccatccggacgtgatcgtcttcgagcaggaatgcgagaaaagcatccagtttcaaacttatgccggaaggcagcggttctggggcgttttcgacgctttgaaactgccgtactacgtcatcgaaaagcgcgaaggcgaaaacgacggcttggtctcggtgcagtccgcccgctggagagatcgctatttcaagggcacgatcgacgaaacggaccatttgaatgagctgggctggtgggagccggcgcagctctttgccggcgagggagagagcgagctgctggagcgcatccacaagctctatctgaacatagcgcaaggcctgccgtag

SEQ ID NO: 460 - protein, 277 aa, Unknown
  Obtained from environmental sample
MTFPIILAHGVCRFDVVINDFLHLDNNDDPTLDRLHYFRGIRTMLKANGFHVYHSKVSWAADVTTRAEDLRRNIEAVLNKEEADKVNIIAHSMGGLDSRHMLFNGRDSNRIHERVASLTTISTPHEGSPFADWMTDHLPRVIPTARQLGLDLKALSDLRTDQCKAFNDHPDVIVFEQECEKSIQFQTYAGRQRFWGVFDALKLPYYVIEKREGENDGLVSVQSARWRDRYFKGTIDETDHLNELGWWEPAQLFAGEGESELLERIHKLYLNIAQGLP

SEQ ID NO: 461 - DNA, 2205 bp, Unknown
  Obtained from environmental sample
atgagcgagaagaaggagattcgcgttgcgttgatcatggggggtggcgtcagcctcggcagtttttcgggtggtgcgcttctcaagaccatcgagctgctgcagcacactgcccgcggtccggcgaagatcgatgtcgtgaccggtgcctcggcgggaagcatgacgctgggcgtagtcatctaccacctcatgcggggatcgtcgaccgatgagattctccgcgatctgaggcggtcgtgggtggaaatgatctcgttcgacggcctctgtccgccgaacctgtcccgtcacgacaagccgagcctgttttccgatgagatcgtccggaagatcgcggccaccgtcatcgatatggggcgcaagctcgaggcggctcctcatccgcttttcgccgacgaactcgtagcctcgttcgcactgacgaacctgaacggcatccccgcccgtacggagggccagctcatccggcaggcaaagggaggcggagggtccgagaagggctcgaaatccgttttcgccgacgccgtgcagactacctttcaccacgacgtgatgcgattcgtggtgcggcgcgatcacaacgggcaaggcagcctgttcgacagccgttaccgggcacgcatactccctccatggaatgttgggaagggcggcgatgcatgggaagcctttcgcacggcggctgttgcctcgggggcgtttccggccgcatttcctcccgtcgagatcagccgcaaccgcgacgaattcaacatctggcccgatcgcatcgaggaccagaaggcatttacgttcgattacgtggacggcggggtacttcgcaacgaacccctccgggaggcgattcacctggccgcgctgcgcgatgagggagcgacggacatcgagcgtgtgttcatcctcatcgacccgaacatcagcggcaccggcgaggtcttcccgctctcctataaccagcagatgcggatcaagccgaactacgattccaacggcgacgtccgacagtacgatctcgatgtgccggactacaccggcaatctgatcggggcgatcggtcggctgggttcggtgatcgtcgggcaggcgacgttccgcgactggctcaaggctgccaaagtgaacagccagatcgagtggcgacgggaattgctgcccattctccgcgacctgaacccgaaccccggggaggaggcgcgcaggggcgtgaacgggatgatcgacaagatctaccggcaaaagtatcagcgcgccctcgagtcaaagagcgttccggtcgaggaggtggaacggcgcgttgccgaagacatcgaacgggacctggcgcggcgccgttcggaggccggcgacaacgacttcattgcccggctcctcctgctcgtcgacctgatcggcaacctgcgtgagaagcagaagctgaacatggtggcgatcacccccgcttccgcgccgcacaacgacgggcgccccttgccgctggccggcaattttatgttcagcttcggggggttcttcagggaggagtacaggcaatacgacttctcggtcggcgaattcgcagcatggaacgtcctgagcacgccggcctccgagacgccctttcttgccgagaccgccccgaaaccgcccgcccgacctccccagccgccggcaatcaatcctacctaccgctcactcggcccgcccatccagcagcggttcgaggagttcgttcgtgggcacgttcgcgcctttatcgcttcggtcgctccgctgggaacgagagggatcgtcacgggcaagattggcggaaagcttcgaacgatgctgatggcctcgcgcaacgggaaatcagagtacttccggcttcgcctctccggcgttgacgggctctacctccgaggctccaagggccgcaacctgagggcggttaacggatcgatcgacacggtcgtcggcgtctatatcgacgaggaagatcagcaccgcgatgagtttttcggtccccatgtcttcggcgcgaacggctcaggctttacgatggaactatgggagtcccgcggttttttcgggcgtgatcgtcgcgtcgctgtgatcgagttggagaacaaccccggcgggttcgcaatcgccgccggatgcaggcggcggcccggcgtggtgctggatatggccaggcgtaacgggcagccactgcggacggtggatgtgatggaatttgcgtga

SEQ ID NO: 462 - protein, 734 aa, Unknown
  Obtained from environmental sample
  DOMAIN (11)...(283): Patatin-like phospholipase
MSEKKEIRVALIMGGGVSLGSFSGGALLKTIELLQHTARGPAKIDVVTGASAGSMTLGVVIYHLMRGSSTDEILRDLRRSWVEMISFDGLCPPNLSRHDKPSLFSDEIVRKIAATVIDMGRKLEAAPHPLFADELVASFALTNLNGIPARTEGQLIRQAKGGGGSEKGSKSVFADAVQTTFHHDVMRFVVRRDHNGQGSLFDSRYRARILPPWNVGKGGDAWEAFRTAAVASGAFPAAFPPVEISRNRDEFNIWPDRIEDQKAFTFDYVDGGVLRNEPLREAIHLAALRDEGATDIERVFILIDPNISGTGEVFPLSYNQQMRIKPNYDSNGDVRQYDLDVPDYTGNLIGAIGRLGSVIVGQATFRDWLKAAKVNSQIEWRRELLPILRDLNPNPGEEARRGVNGMIDKIYRQKYQRALESKSVPVEEVERRVAEDIERDLARRRSEAGDNDFIARLLLLVDLIGNLREKQKLNMVAITPASAPHNDGRPLPLAGNFMFSFGGFFREEYRQYDFSVGEFAAWNVLSTPASETPFLAETAPKPPARPPQPPAINPTYRSLGPPIQQRFEEFVRGHVRAFIASVAPLGTRGIVTGKIGGKLRTMLMASRNGKSEYFRLRLSGVDGLYLRGSKGRNLRAVNGSIDTVVGVYIDEEDQHRDEFFGPHVFGANGSGFTMELWESRGFFGRDRRVAVIELENNPGGFAIAAGCRRRPGVVLDMARRNGQPLRTVDVMEFA

SEQ ID NO: 463 - DNA, 1854 bp, Unknown
  Obtained from environmental sample
atgggtgtgtttgattacaagagcttcactgcaagtgattccaaggcgctgtttgccgatgccatggcgatcactctgtattcctaccacaacctcgacaacggctttgccgtgggttaccagcacaatggcttcggcctgggcctgccggcgaccctggtcacggcgctgatcggcagtggcgattcccagggggtgatcccggggattccctggaaccccgattccgaaaaggccgcgctggacgccttgcacaaggctggctggtcgaccatcagtgcccagcagttgggctacgacggcaaggtcgacgcccgcggtaccttcttcggcgagaaggccggttatgacacggcgcagctggaaatcctcggcaagtacgatgcccagggccacctggagtccatcggcattgcctttcgtggcaccagcgggccgcgggaatcagtgatcggcgacaccatcggtgacgtgctcaacgacctgctggcggccctggggcccaaggactatgcgaagaactacgccggcgaggcattcggcaagctgctggggaacgtcgccgcgttcgcccaggccaatggcctgtccggcaccgacatcctggtcagcggccatagcctgggcgggttgggggtcaacagcctggccgacctgagcagtgaacgctggtcggggttctacaaggactccaactacatcgcctatgcctcgccaacccagagcgccagcgacaaggtgctgaacatcggctacgagaacgacccggtgttccgcgccctggacggctccagcttcaacttgtcgtcgctcggggtgcatgacgcccaccaggactcggcgaccaacaacatcgtcaacttcaacgatcattacgcctcgagcctgtggaacgccttgccgttctcgatcctcaacatccccacctggatctcgcacctgcccactggctacggcgacggcctgacccgggtgctggagtcgaagttctacgatttcaccagcaaggactcgaccatcgtggtggccaacctgtcggacccggcgcgggccagtacctgggtccaggacctcaaccgcaacgccgagacccacaagggcagcaccttcatcatcggcagtgacggcaacgacctgatccagggcggcaacggcaacgactacctggaaggccgggcgggcaacgataccttccgcgacagcggcggctacaacatcatccttggcggccagggccacaacaccctggacctgcagcactcggtgcaggactacagtttcgccagcgacggcgctggcaccctgtacgtgcgtgacgccaatggcgggatcagcatgacccgcgacatcggcgcgatccagagcaaggaaccggggttcctctggggcctgttcaaggacgatgtgacccaccaggtcagcgagcaggggctcaaggtcggcaaccaactgaccgcgtacgcgtctgcgctcaagggcgatgccgctgacaacgtgctcaaggcccatgacggcggcgactggctgttcggcctcgacggcaacgatcacctgatcggcggccagggcaatgacgtgttcgtcggcggcgccggcaatgacctgatggagtcgggcggtggccacaacaccttcctgttcaccgggcatttcggccaggaccgcatcctcggctaccagagtggcgacaagctggtgttcatgggcgtcagtggcgtgctgccggaccaggactaccgggctcacgccagcagcagcggccacgacaccgtgctgaccttcggccaggactcggtgaccctggtgggggtcagcctggagcacctcaacggttccggcatcgttctcgcctga

SEQ ID NO: 464 - protein, 617 aa, Unknown
  Obtained from environmental sample
  DOMAIN (133)...(265): Lipase (class 3)
  DOMAIN (381)...(398): Hemolysin-type calcium-binding repeat (2 copies)
  DOMAIN (510)...(527): Hemolysin-type calcium-binding repeat (2 copies)
MGVFDYKSFTASDSKALFADAMAITLYSYHNLDNGFAVGYQHNGFGLGLPATLVTALIGSGDSQGVIPGIPWNPDSEKAALDALHKAGWSTISAQQLGYDGKVDARGTFFGEKAGYDTAQLEILGKYDAQGHLESIGIAFRGTSGPRESVIGDTIGDVLNDLLAALGPKDYAKNYAGEAFGKLLGNVAAFAQANGLSGTDILVSGHSLGGLGVNSLADLSSERWSGFYKDSNYIAYASPTQSASDKVLNIGYENDPVFRALDGSSFNLSSLGVHDAHQDSATNNIVNFNDHYASSLWNALPFSILNIPTWISHLPTGYGDGLTRVLESKFYDFTSKDSTIVVANLSDPARASTWVQDLNRNAETHKGSTFIIGSDGNDLIQGGNGNDYLEGRAGNDTFRDSGGYNIILGGQGHNTLDLQHSVQDYSFASDGAGTLYVRDANGGISMTRDIGAIQSKEPGFLWGLFKDDVTHQVSEQGLKVGNQLTAYASALKGDAADNVLKAHDGGDWLFGLDGNDHLIGGQGNDVFVGGAGNDLMESGGGHNTFLFTGHFGQDRILGYQSGDKLVFMGVSGVLPDQDYRAHASSSGHDTVLTFGQDSVTLVGVSLEHLNGSGIVLA

SEQ ID NO: 465 - DNA, 1038 bp, Unknown
  Obtained from environmental sample
atgagcgagtcgcgcacgcatccgccgctggagctgtctcacaccgccatgagcgaggaggaggcgcttcgcttcctggacggccaccggatccgcctggggcaccgcacgatggaccccaaggcccagatcgtgggtgagttcgtcaaatcgatccgcgtgccggggtacttcccgccgctgccagagctgcgccagcaactccgcaccatggtgacgctgatggatgagccggcgccgacactgccgcgcgtcgaggacatccgcattccggggccggccggccacatcccggcgcgggtctacgcgccgggcgccgacgacgcgctgcggccgtgcgtggtgtacttccacggcggcggctgggtgcagggggatctcgagacccatcatgggctctgcgcgcgactcgccacgcacgggggcgtgctcgtcatcgccgtcgactaccggctggcgcccgagcacaagttcccggctgcggtcgaggactgcctggcggcctatcgctggctccgggctcatgggcgcgacgtcggcgccgaccccgaccgcgtggcggtggccggcgactcggccggcgggaatctctcggctgtcgtcgcgcagctcgccgcctccggcggggcgccggtgcccacgtgccaggtcctcatctaccccgccgtcgacttctccctcgagacggagtctcaccgcgacctggcggacgggcacgtgatcccgcgcgaccgtatcgtctggtacacggagcaatatctcaggagcgaagcggacaaggccgatctgcgggcctcgcccctccgcgcgccgagcctcgccggccagccgccggctctggtcgtcaccgccggcttcgatccactgcgcgacgagggccgggcgtacgccgatcggctgcgcgaggccggcgtggacgtcgtcgaccgtgagtacccgggccagatccacgcgttcgtgtcgctgaccaaggccatcccgcaggggatggcctgtaccctggagatcgcgaactatctgcggcagcgtctcgggtga

SEQ ID NO: 466 - protein, 345 aa, Unknown
  Obtained from environmental sample
MSESRTHPPLELSHTAMSEEEALRFLDGHRIRLGHRTMDPKAQIVGEFVKSIRVPGYFPPLPELRQQLRTMVTLMDEPAPTLPRVEDIRIPGPAGHIPARVYAPGADDALRPCVVYFHGGGWVQGDLETHHGLCARLATHGGVLVIAVDYRLAPEHKFPAAVEDCLAAYRWLRAHGRDVGADPDRVAVAGDSAGGNLSAVVAQLAASGGAPVPTCQVLIYPAVDFSLETESHRDLADGHVIPRDRIVWYTEQYLRSEADKADLRASPLRAPSLAGQPPALVVTAGFDPLRDEGRAYADRLREAGVDVVDREYPGQIHAFVSLTKAIPQGMACTLEIANYLRQRLG

SEQ ID NO: 467 - DNA, 267 bp, Unknown
  Obtained from environmental sample
atggccgcatcctgtccccacctggccgagatccagacccgcgccgccaagaccgacggctgcgaagaatgcttgaagaccggcgagacctgggtccatctgcgcgtctgcttggtatgcggcaaggttggttgctgcgacaactcgaagaacaagcacgccacccggcatttccacgaaaccagccacccggtcatgcgctcgaaagaaccgggcgagacctggggctggtgctacgtcgaccgcaagatgttcgatccgatctga

SEQ ID NO: 468 - protein, 88 aa, Unknown
  Obtained from environmental sample
MAASCPHLAEIQTRAAKTDGCEECLKTGETWVHLRVCLVCGKVGCCDNSKNKHATRHFHETSHPVMRSKEPGETWGWCYVDRKMFDPI

SEQ ID NO: 469 - DNA, 975 bp, Unknown
  Obtained from environmental sample
atgtgggtgcagcgtgccgtcgggctgctgcttatcctcagcgcgctggcgctggcgctgtcgcgtgcgcccgatgtgccggctgaaggcctggtggcgcgctgggcgccgccgccctcggacttcattgccgtccaggggcagaccgtgcacttgcgcgacgaaggcccgcgccacgacggcgccgccaacggcccgccgcccatcgtgctcatccacggcacctcggccagcctgcacacctgggagggctgggccaaggcgctgaggggccagcgccgcgtcatcagcttcgacctgccgggtttcggcctcaccggcccgttcattgccaacccggccggcggctacgaggccgacaactaccacggcgacacctacgcgcgcttcgtgctcgacctgctggacgcgctgcaggtcaggcgtgccgtcatcgccggcaactcgctgggcggtgaagtggcttggcgcaccgccgcgatggcgcccgagcgtgtcgccggcctcgtgctggtggacgccgcgggcccgcgcttcacgccccaggccgtgccgctggggtttctgctggcgcgcgtgccggtgctcaacaagctgggtgaatgggcgctgccacgcggcatggtggtcgaaggcctgcacagcgtctatggcgaccccacgcgcgtcaccgaggagctggtggaccgctacttcgagctcgcgctgcgcgaaggcaaccgccgcgccctgggtctgcgcatacggcagatggagatgggcgcggacgaggaacgcatcgccacgctgaagctgcccacgctcattctgtggggcggccgcgaccgcctgataccgcccgcggtgggcgaggagttcgaacgtcgcattgtgggcagccggcgcgtggtgttcgagcagctgggccacgtgccgcaggaagaagacccggtcctgagcgtggggccggtgaaggaattcctggcgctgcactga

SEQ ID NO: 470 - protein, 324 aa, Unknown
  Obtained from environmental sample
  DOMAIN (93)...(319): alpha/beta hydrolase fold
MWVQRAVGLLLILSALALALSRAPDVPAEGLVARWAPPPSDFIAVQGQTVHLRDEGPRHDGAANGPPPIVLIHGTSASLHTWEGWAKALRGQRRVISFDLPGFGLTGPFIANPAGGYEADNYHGDTYARFVLDLLDALQVRRAVIAGNSLGGEVAWRTAAMAPERVAGLVLVDAAGPRFTPQAVPLGFLLARVPVLNKLGEWALPRGMVVEGLHSVYGDPTRVTEELVDRYFELALREGNRRALGLRIRQMEMGADEERIATLKLPTLILWGGRDRLIPPAVGEEFERRIVGSRRVVFEQLGHVPQEEDPVLSVGPVKEFLALH

SEQ ID NO: 471 - DNA, 1185 bp, Unknown
  Obtained from environmental sample
atgacagcgacagggagaggaacaacagagcaggcgaaccgcatcgttcagcaggccgtcgatgctgcgatccgtgacggtggagagattggcctgcaagtagccgcctatgtgaatggcgaactcgtggtggacgtctggggcggcctggcggatgaaaccactggacggaaggtcaatggcgataccctctttcccgtcttctcggtcaccaaggccgtcacggcgacggccttgcatatccaggcagagcgtggcttggtcgagtatgatacgcccatcgctcgctactggccggagtttggcgcgcacggcaaggacaagggaacggtgcgcgatgcgctcacccaccggatcggcatcccccagatgcccgagggcgtgacgcccgagcaaatgtgcgattgggagtggatggtgcagcggctggcggacaccaagcccctctttgccccgggcaccaagagcgcatacctggcgtacacgtttggctggatcattggcgagatcgtgcggcgcacggatcctaacaggcggcccttcggcagatttgtccaggaagagatctgtgccccgttgggcattgataacctctggcttggcatcccggacgcggtggagccgcgggtggccaagctcaccaatatccctcgacctgcccccggagcgccggggctccctgccgagtcgctcctcccgctggcaatcccccctcaggtggggacggtccaaggggtgttcggccggcctgatgtgcgccgggcctgtattcccggcgccggcggcatcatgaacgcgcgcagcgcggcgaggttttttgccctgctggccaatggcggggagctgaatggagcgcgcctcctctcgcaggagcgcgtccgttccttcagcacgccgcgggcgaggcgggaggagttcgatccagtggtctggagtgtcctgaatctgggcatggccgggttttggctcggtggcgagtcgcccccttcggccccggtcgtcgggcgcaacccgcacatcatttgccatcctggggcaggcgggtcgatcggctgggccgacccagacgcctgcctggccgtggccatctgtcataaccggatgtttcacgcacccacgcccaaggggaacccattcgcgccgatcggggacgctgtgcgggcggcgctgggggtagcaggctaa

SEQ ID NO: 472 - protein, 394 aa, Unknown
  Obtained from environmental sample
  DOMAIN (16)...(385): Beta-lactamase
MTATGRGTTEQANRIVQQAVDAAIRDGGEIGLQVAAYVNGELVVDVWGGLADETTGRKVNGDTLFPVFSVTKAVTATALHIQAERGLVEYDTPIARYWPEFGAHGKDKGTVRDALTHRIGIPQMPEGVTPEQMCDWEWMVQRLADTKPLFAPGTKSAYLAYTFGWIIGEIVRRTDPNRRPFGRFVQEEICAPLGIDNLWLGIPDAVEPRVAKLTNIPRPAPGAPGLPAESLLPLAIPPQVGTVQGVFGRPDVRRACIPGAGGIMNARSAARFFALLANGGELNGARLLSQERVRSFSTPRARREEFDPVVWSVLNLGMAGFWLGGESPPSAPVVGRNPHIICHPGAGGSIGWADPDACLAVAICHNRMFHAPTPKGNPFAPIGDAVRAALGVAG

SEQ ID NO: 473 - DNA, 453 bp, Unknown
  Obtained from environmental sample
gtgagcagcgacctcgacagaccgtatcggggtggattcgtaggccgcgagcatcgcttcgcgctgaccgtctatttcgaggacaccgacaccgccggcattgtctattacgccaattacctgaaattcatggagcgggcgcgctccgacatgcttcgcgccgtcggcatcgaccagaaagcggagctggcaacctcgggctgcgcctatgcggtcgccgatgtcgccatcaaatatcgaaagcccgcctatctcggcgaggaccttgtggtggtcagcacggtggaggcggttcggtcggcgtcggtgacgattcatcagacagtcatgcgcggggccgaattaataaccgacagcatcgtcaccgcagccttcctggattcggagcaaagaccgaagcgccagcccaaggcttgggtggagcggttcaattcgattgccaaaggggaatga

SEQ ID NO: 474 - protein, 150 aa, Unknown
  Obtained from environmental sample
  DOMAIN (22)...(124): Thioesterase superfamily
MSSDLDRPYRGGFVGREHRFALTVYFEDTDTAGIVYYANYLKFMERARSDMLRAVGIDQKAELATSGCAYAVADVAIKYRKPAYLGEDLVVVSTVEAVRSASVTIHQTVMRGAELITDSIVTAAFLDSEQRPKRQPKAWVERFNSIAKGE

SEQ ID NO: 475 - DNA, 1158 bp, Unknown
  Obtained from environmental sample
atgaacagatggctcaaattcctgatcggcctggcactcgggctggttctggccgcactctacgtactgaatccacgtctgccttcaccagagggtgaacaaagcgccctgctgtaccaacccggcagcttcggtgtccagcaagagtccatcgccctgatcgactcctctcggcccacacgtgccaatggtgacttcgcgggcagcgacgtgcgtgaactgaacgggtatgtctggtatcccgatgcagaccctcgatcacatggcccgtttccgctgattgtgtacagccacggtttcatgtcctcggtggcggaaccggagtacctcgtggactttctggtgcccaagggttatgtggtggtggcggtgaactatccactcagccacggtggtgcaccgggtggcccgacggtggtggatgtcatcaatcaacccggcgatgtggcctttgtcatcgataccctgctggccagaaataccgatgcacaggattcactgttcgggcttgtggatcctacgcgcatcgccgctgtgggtctgtcactcggggggctgacaacccagcttgcggcgtttcaccgggatgaacgcgacccgcgtattgctgctgccgtttccatagccggaccgagctcaccactggaggcacggtttttcgagactgcggacgtgccgttcatgatgattgccggcagtggtgatgccattgtgccttatgaggccaacgccgagtctatcccatccagggcacccggcagtgtgctggtgacgctggacggcggttcacatgtgggatttgccggcattgccaccaccgccttccgatggttccgtcatccggacaggtgggtatgccccatgctgctcagtggactcgaccgggaggacaatgagggagaactgctgcttgaaccggatccggacattggaatttccaccaacatggtggcaccctgcaccatggaaacctgggaacgggccatgcgtccggcccggcagcagatgctcactcgcctggcactgtacgcctttctggagcagcatttcaatgccgacgcagcagtgcgtcagcaaatgagcagctacattgcacaaggtttgtcagcagaacatccggacgccgttgtcacacccggcgccttgccgtatcgttga

SEQ ID NO: 476 - protein, 385 aa, Unknown
  Obtained from environmental sample
  SIGNAL (1)...(18)
MNRWLKFLIGLALGLVLAALYVLNPRLPSPEGEQSALLYQPGSFGVQQESIALIDSSRPTRANGDFAGSDVRELNGYVWYPDADPRSHGPFPLIVYSHGFMSSVAEPEYLVDFLVPKGYVVVAVNYPLSHGGAPGGPTVVDVINQPGDVAFVIDTLLARNTDAQDSLFGLVDPTRIAAVGLSLGGLTTQLAAFHRDERDPRIAAAVSIAGPSSPLEARFFETADVPFMMIAGSGDAIVPYEANAESIPSRAPGSVLVTLDGGSHVGFAGIATTAFRWFRHPDRWVCPMLLSGLDREDNEGELLLEPDPDIGISTNMVAPCTMETWERAMRPARQQMLTRLALYAFLEQHFNADAAVRQQMSSYIAQGLSAEHPDAVVTPGALPYR

SEQ ID NO: 477 - DNA, 885 bp, Unknown
  Obtained from environmental sample
atgcaaggattcaagcatactcatcatctgtctctgctcgcggccacggtgctggccggctccagcctgctcggcgcgtgcgccagcagcggcaacagcgggttcgagctcgacaccgagggcgcgctcgcgggcaacttcccctccgtcagctcgttcgcggatcccggcccgttcgacacgacccagcaggcgctgggcgactgcaccgtgcaccgccccaacacgctcggagagaacggcctcgtgcacccggtcatcatctggggcaacggcacgttctcgtggccggcgatctacggcggcctgctctcgcacctcgcgagccacggcttcatcgtcgccgcggcgaacacgtcgaacgccggcgacggcagccagatgatcgcgtgcctcgacgccgtgctcgccgccagcgagacggccggcagcccgttctacaagcacgtcgacgccgcgcacgtcggcgcggccggccactcgcagggcggcgccggcacgatcatggccggccgcgacgcgcgcgtgcgggtgaccgcgccggtcgagccgtacatcggctggatccccggcggcggctcgttcgacgacgacgcgatctgggagcagcagggcccgatgttcctgctctccggctcgctcgacgtggtggcgctgcccctgctgcaccagcgccccgtgtacgacgacgtcaaccagcccgtgttctgggccacgcgctccggcgtgacgcacttcgagccggtcggcgacgccggcgagttccgggctccgctcacggcatggttccgggcctggctcatgggcgatacggcggctgcgaaggtgttctcgaacccgtgcacgctgtgctcgaagagggagtggacgatccacttccagtag

SEQ ID NO: 478 - protein, 294 aa, Unknown
  Obtained from environmental sample
MQGFKHTHHLSLLAATVLAGSSLLGACASSGNSGFELDTEGALAGNFPSVSSFADPGPFDTTQQALGDCTVHRPNTLGENGLVHPVIIWGNGTFSWPAIYGGLLSHLASHGFIVAAANTSNAGDGSQMIACLDAVLAASETAGSPFYKHVDAAHVGAAGHSQGGAGTIMAGRDARVRVTAPVEPYIGWIPGGGSFDDDAIWEQQGPMFLLSGSLDVVALPLLHQRPVYDDVNQPVFWATRSGVTHFEPVGDAGEFRAPLTAWFRAWLMGDTAAAKVFSNPCTLCSKREWTIHFQ

SEQ ID NO: 479 - DNA, 1272 bp, Unknown
  Obtained from environmental sample
atgaacaacacacgtgccctcaggcatgccgctgccgcattcacgttcgccctggccggcgcccccgcgctggccgccaacagctaccccgtgatcctcgtccacggcttcgccggcttcggccgctccgagctgctgggctacaagtactggggcggcctcaacgacctgcaggagcagttgaaggccaggtactcgaaccagctggtggccaccgcggtcgtcggcccgttcagctcgaactgggatcgcgccaccgaacttttctaccagatcaagggcggctgcgtcgactacggcgcgctgcatgcggcggcgaacgggcacctcgaacggccggagagcttcttccacaatggccgcacctgctaccccgggctgtatccggcctgggacgccagccatccggttcacctcatctcgcacagcatgggcggccagacctcgcgcatgctggtgcaactgctggccgccaacggcgcgcccgccaatccatcgctgtttccgtatgcggtcaacgcgagctgggtcaagagcgtgacgacgatcgccacccccaatgacggcaccacgctcgcctaccgcatcgtcgactgggtgccgttcgtgcagcagctcgtgaccggcatcgcgggcgcctccggcgcgaccggaggcaacgccatctacgacttcaagttcgatcaatggggcgtcgggccgcgcacggccggcgagagcttcggcgactacgtgaaccgcgtgaccagcctgccgctctggaactcgggcatcaaggacctgtcgccgtacgacctctcgcccgcgggcgcgatggccgagaacgactgggtcaaggaccagcccgacgtcacgtacttctcgtgggtcacgaactccagctacacgggcatcctcacgggctggtcgtatcccgacctcgataccaacgtcctgatcggcgcgttcgccggccccggcttcatgggcaacttctaccgcgactcgcgcccgatgccgccggtcgccgacagcagctggttccccagcgacgcagtggtgaactcgatcgcgcagaaggcgccgacctgggcgatgaacgcgtcgggcaccatctacaggcgatccgtcgtcgtccgcgacatcagcaacggcggcacgccgcaggccggcgcctggaactacaagggccagctgagcggcttcgaccacctcgacgccgtcggctggacgctgttctgggacagcctgggctggtacaaggcgcgcgtggacgagctgcgggcgctgtag

SEQ ID NO: 480 - protein, 423 aa, Unknown
  Obtained from environmental sample
  SIGNAL (1)...(25)
MNNTRALRHAAAAFTFALAGAPALAANSYPVILVHGFAGFGRSELLGYKYWGGLNDLQEQLKARYSNQLVATAVVGPFSSNWDRATELFYQIKGGCVDYGALHAAANGHLERPESFFHNGRTCYPGLYPAWDASHPVHLISHSMGGQTSRMLVQLLAANGAPANPSLFPYAVNASWVKSVTTIATPNDGTTLAYRIVDWVPFVQQLVTGIAGASGATGGNAIYDFKFDQWGVGPRTAGESFGDYVNRVTSLPLWNSGIKDLSPYDLSPAGAMAENDWVKDQPDVTYFSWVTNSSYTGILTGWSYPDLDTNVLIGAFAGPGFMGNFYRDSRPMPPVADSSWFPSDAVVNSIAQKAPTWAMNASGTIYRRSVVVRDISNGGTPQAGAWNYKGQLSGFDHLDAVGWTLFWDSLGWYKARVDELRAL

SEQ ID NO: 481 - DNA, 750 bp, Unknown
  Obtained from environmental sample
atgagagttgtacaacccaaaccttttacttttgaaaaaggtccgcgggccgttttattattgcatggttttacggggcattctgccgatgtacggatgcttggacgctttttagaagagagaaactatacatgccatgcaccgatttatcgtggacatggtgttgcaccagaggagttaataaagacaaaccccaatcagtggtgggaagacgttgaggaagcttttaaccacttaaaagaacgcggttatgaggaaattgcagtagcgggtctttcacttggtggggtttttagtttgaaacttgcttatacgaaacccgtaaaagcagttattcccatgagtacaccgatgtttttcgacaatgaagaacaattaacaaatgggtttcattactttacaagacaatataaaagattagaaggaaaatcaaaagaggaaatcgaggatgaaacaaaagcggtcatggaggattccggatcgatattcaatcaagtggctgattacattgctgatgtgaggtcccatgtggatttaatttatacgccggcgatggtcgtccaggcgggaaaagatcaaatgatcaataaggacagtgcaaattatatctacgaacacctggaatcagataaaaaagaaataaaatggtatgaggaatcaggacatgtcattacggtcgataaagaaaaggaacagctttttgaagatatctatcaatttttagagtctttagactggaaatcatcgtaa

SEQ ID NO: 482 - protein, 249 aa, Unknown
  Obtained from environmental sample
MRVVQPKPFTFEKGPRAVLLLHGFTGHSADVRMLGRFLEERNYTCHAPIYRGHGVAPEELIKTNPNQWWEDVEEAFNHLKERGYEEIAVAGLSLGGVFSLKLAYTKPVKAVIPMSTPMFFDNEEQLTNGFHYFTRQYKRLEGKSKEEIEDETKAVMEDSGSIFNQVADYIADVRSHVDLIYTPAMVVQAGKDQMINKDSANYIYEHLESDKKEIKWYEESGHVITVDKEKEQLFEDIYQFLESLDWKSS

SEQ ID NO: 483 - DNA, 1365 bp, Unknown
  Obtained from environmental sample
atgaaattgcaactcttaatacttttagtttttgtgatttctgttgttggagctactaaaatcagcgatcttggagaagtttatactgtgaaaactgcggacggaattacattgaaactcctgagatatcatccacccggtgggcaaccaaacgctggagctcagccagttttgctattttctggattgctttgcaacatgaacgaatttgtcgtattcacaccagatggacttgaaagcaagtacaaaccctactatcctaaggaacttgcagaatgggctaaagatgatccctacatagccaaagacccgatgctctactacagtctcgcacactacctgtggaaaaaaggttacgatgtctggctgctcaactatcgtggaactggtgtaggagagatgaaaagcggtgttggcaatgcaagagttagccttgacgtctgggccctctacgatgttcctgcagcgatcgattttgtaaataaaaagactggaaaaagcctaattattggcggccacagcacgggaggacttgtaacctatgtatatttgcaaggagcaaaattcgtcaaaactccatcatgcctgataaatttggcttggtgtgaaaaagtttcggcatcagattcgcttgcagaagaaagaaacagtaagatcgttggcgtcattgcaatcgatccagcgatgattcctcctttgcccaaaatacttgatacaaaagctggatggttgcttcttgacacaccgctttacatagacttgagggacacaattgagactttagcgaagaaaaaagggctgtgggaaagtttccttttgactgagaagtttttattcgaagctatatactcgctttacaatcgctacggagagatatctgagataataaaagctctggctttcatgaatccgaacaacatgaatcctgctttgtcagacttcatgacaagatacgtagccgatagtctttacacacctacattagcccagtatgcggattttggtttaagaaatactgcaagagagtattttgaaaacggtgggaagggatatctggtcgttccaccatatcctaggcctggcgatggttactactattataaaggagagaatatgaaaaaagttaaagttccatacataactatcctctctgagcttccaggtttggttgatgcaaatcaaattataaaagacttgatgcaggctaaaacaaagcatcaactcgacagatactatataatccctggcacgggacacttagacgtagccttgggcctgaatgtcccgacagaagtctttccgaaaattggagcttggcttgatgatctgcaagaattaataggatacccaactactccgcattaa

SEQ ID NO: 484 - protein, 454 aa, Unknown
  Obtained from environmental sample
  SIGNAL (1)...(17)
MKLQLLILLVFVISVVGATKISDLGEVYTVKTADGITLKLLRYHPPGGQPNAGAQPVLLFSGLLCNMNEFVVFTPDGLESKYKPYYPKELAEWAKDDPYIAKDPMLYYSLAHYLWKKGYDVWLLNYRGTGVGEMKSGVGNARVSLDVWALYDVPAAIDFVNKKTGKSLIIGGHSTGGLVTYVYLQGAKFVKTPSCLINLAWCEKVSASDSLAEERNSKIVGVIAIDPAMIPPLPKILDTKAGWLLLDTPLYIDLRDTIETLAKKKGLWESFLLTEKFLFEAIYSLYNRYGEISEIIKALAFMNPNNMNPALSDFMTRYVADSLYTPTLAQYADFGLRNTAREYFENGGKGYLVVPPYPRPGDGYYYYKGENMKKVKVPYITILSELPGLVDANQIIKDLMQAKTKHQLDRYYIIPGTGHLDVALGLNVPTEVFPKIGAWLDDLQELIGYPTTPH

SEQ ID NO: 485 - DNA, 2283 bp, Unknown
  Obtained from environmental sample
gtgttatgtgcgctgggcggagcagggcgcttgagctataccgtcgccgtgcgggcattgtgcgagttcacggccaaggcgggtgacctcgatttgcggtttaccccgtcgcccagtgcccaggaaggcatggttgggcatcgcatggtggcatcgcgccgcagcgcgcactaccagagcgaagtggctctggaggggctctaccaacagttgaccgtgcgtggccgtgccgatggctatgatccggatcgcaatgtgctggaagaggtcaagacctaccgtggcgacctggctgcccagccggccaaccaccggcaactgcactgggcccaggccaaggtctacggctggctgatgtgcagcacgctggggttgcccgagattggcttggcgctggtgtatttcgatatcgtcagcgagcgcgaaacggtgatcagccaggtttgcacggttgatgaactgcaagcgttcttcaatcgccagtgcgcgttgtttctcggctgggccgagcagcaggcccgccagcgccaggcccgggacgccgcgaccaaggccctggcctttccccacgcaggctttcgcctgggccagcgcacccttgccgagtcggtgtacaaggccgtcagtaccgggcgctgcctgatggcgcaggcccccacggggatcggcaagaccatggggacggtgttcccgatgctcaaggcgatggcgccgcagcagttggacaagctgttcttcctcacggccaagaccccgggccgcaaactggcgctggacgcggtgcaggtgctgcacgccagtaccgacctgccattgcgcgtgctggagctggtggcgcgagacaaggcctgcgagcacctggacaaagcctgccacggcgattcctgcccgctggccaagggcttttatgatcgcctgccagccgcgcgcgaagctgccgccgaggtgcggctgctggatcagcgtcatttgcgcgaggtggcgctggcccacggggtgtgcccctattacctgagccaggaaatggcgcgctggtgcgacatggtggtcgccgactacaactattactttgattttggcgccatgctgtttggcctggcccagctcaaccaatggcgggtcgctgtgctggtggacgaagcccataacctggtggagcggggccgctcgatgtacagcgccgaccttgatcagtttgccctgaagagcttgcgcgataccgcccccgaaccgttgaaaaaaccgttgcagcggctcaaccgagaatggaatgcactgcacaaggagcaggtcgcggcgtaccaggcttatgccagcaaaccggacaagctgttgcaggccctggccctgtgcaccagcgccatgggcgagtatttcaacgaccatccgcaggcactcacgggccaactgcaaggcttttacttcgaggccttgcagttcgccaaggtggcggagctgttcaacgagcagtttgtttttgacatcagccagcgcgacccgctggccaggcgccgcttctcacgcttgagcctgcgcaatgtggtcccggctgagtttctccgcccacgcttgacggcggcccgcagcagcgtgctgttttccgcaaccctgagcccccggcattactatgccaacctgctgggtctgccggcggataccccatggatcgacgtggaatcgcccttcgaggctgcgcaactgcaagtgcacatcatcgaccgcatctccacccgttttgtgcatcgccaggcctccctggcgcccatcgtcgcgctgatcgccgagcagtttgaacgtgcgcccggcaactacctggcatttttcagcagctttgattaccagcagcaggtggcgcagttgctggccgaacggtatccgtcgatccccacctggcatcagtcgcggggcatggccgaggccgagcgccaggccttcctcgaccagttcaccgcgcacagccagggcgtggggtttgcagtgctgggcggagcgttcggcgaagggatcgacctgcctggcgcacgcctgatcggggcctttatcgccaccctgggcctggcgcaactcaacccggtcaacgaacagataaagctgcgcatgggcgcgctcttcggtgaggggtatgactacacctacctgtatcccgggatccagaaggtggtgcaggcggcggggcgggtgattcgcacccagcaggaccagggggtggtgatgctgatcgatgaccgttttgccgagcccaaggtgcggtcgctgttgccgcgttggtggtcgctgacctga

SEQ ID NO: 486 - protein, 760 aa, Unknown
  Obtained from environmental sample
MLCALGGAGRLSYTVAVRALCEFTAKAGDLDLRFTPSPSAQEGMVGHRMVASRRSAHYQSEVALEGLYQQLTVRGRADGYDPDRNVLEEVKTYRGDLAAQPANHRQLHWAQAKVYGWLMCSTLGLPEIGLALVYFDIVSERETVISQVCTVDELQAFFNRQCALFLGWAEQQARQRQARDAATKALAFPHAGFRLGQRTLAESVYKAVSTGRCLMAQAPTGIGKTMGTVFPMLKAMAPQQLDKLFFLTAKTPGRKLALDAVQVLHASTDLPLRVLELVARDKACEHLDKACHGDSCPLAKGFYDRLPAAREAAAEVRLLDQRHLREVALAHGVCPYYLSQEMARWCDMVVADYNYYFDFGAMLFGLAQLNQWRVAVLVDEAHNLVERGRSMYSADLDQFALKSLRDTAPEPLKKPLQRLNREWNALHKEQVAAYQAYASKPDKLLQALALCTSAMGEYFNDHPQALTGQLQGFYFEALQFAKVAELFNEQFVFDISQRDPLARRRFSRLSLRNVVPAEFLRPRLTAARSSVLFSATLSPRHYYANLLGLPADTPWIDVESPFEAAQLQVHIIDRISTRFVHRQASLAPIVALIAEQFERAPGNYLAFFSSFDYQQQVAQLLAERYPSIPTWHQSRGMAEAERQAFLDQFTAHSQGVGFAVLGGAFGEGIDLPGARLIGAFIATLGLAQLNPVNEQIKLRMGALFGEGYDYTYLYPGIQKVVQAAGRVIRTQQDQGVVMLIDDRFAEPKVRSLLPRWWSLT

SEQ ID NO: 487 - DNA, 1854 bp, Unknown; identical to SEQ ID NO: 97
  Obtained from environmental sample

SEQ ID NO: 488 - protein, 617 aa, Unknown; identical to SEQ ID NO: 98
  Obtained from environmental sample
  DOMAIN (133)...(265): Lipase (class 3)
  DOMAIN (381)...(398): Hemolysin-type calcium-binding repeat (2 copies)
  DOMAIN (510)...(527): Hemolysin-type calcium-binding repeat (2 copies)

SEQ ID NO: 489 - DNA, 951 bp, Unknown
  Obtained from environmental sample
atgagcatcctggtcgaactgcccgagcggctctatcagcgcgatgcatttgcgacgttcaacgccgcgccgcggttcgatctcgggaccgcgcgggcaatggcgtggatgtcgcagctcgcctacgaaagcgatcccgaaaagatcgcaaggatcgccgggctgtgggagctacgcaatgtccgcgtactggccagtccgaggacgctcgaccagccactcgtccgcacgcggggtctcgtggccgaggggcatggcgcgacgttcgttgccttcgccggcaccgatccgttggtgccggccaactggttcaccgatttcgacttcaagctgatccccggcatggcgctgccaggtaccgaagtgacgcccggcagcgtgcaccgcggcttcgagcgcggcgtcgccgcggtatgggaccagatcgtcgcggcgctcgccgcccgccctgggacgcccgtcctcatgaccggccacagtctcggtgcggcgctcgccgcagtcgtcgccgaccgcgcgctctcggatgataaggtcaacatgcgcgccagcggcgtgtattgcttcggcatgccgcgcattggcgacgaggatttcgcgctgcgctacaacgacacgctcggccccgccacctatcgcctcgtgcatggcgacgacatcgtcgcgaccgtgccgccgtcccgcctcggcttccgccatgtcggcaagctcgtccgctgtccccgcgccggccgcttcggcgccgacgtgccggcggacttcggagacgacccgcccttcgccagcacactgaagacgggtctgcaccagggcttgagcgatctgttcaagctgcaactgcagccgacatttcgcgacgatccgctgggacgcatgtcgggactgctggcgccgccgatcgcggaccatctgccggaccgctactggagcgcattcggcaacgggggttaa

SEQ ID NO: 490 - protein, 316 aa, Unknown
  Obtained from environmental sample
  DOMAIN (85)...(229): Lipase (class 3)
MSILVELPERLYQRDAFATFNAAPRFDLGTARAMAWMSQLAYESDPEKIARIAGLWELRNVRVLASPRTLDQPLVRTRGLVAEGHGATFVAFAGTDPLVPANWFTDFDFKLIPGMALPGTEVTPGSVHRGFERGVAAVWDQIVAALAARPGTPVLMTGHSLGAALAAVVADRALSDDKVNMRASGVYCFGMPRIGDEDFALRYNDTLGPATYRLVHGDDIVATVPPSRLGFRHVGKLVRCPRAGRFGADVPADFGDDPPFASTLKTGLHQGLSDLFKLQLQPTFRDDPLGRMSGLLAPPIADHLPDRYWSAFGNGG

SEQ ID NO: 491 - DNA, 987 bp, Unknown
  Obtained from environmental sample
ttgaggttttttgccattcatcttttgctcataggttcagttattctttccggctgtcagaccgcacagaacagtaaagtcattgccggtgcttttaacctgaccacaggcttgcagcaaaaagtgatggatcattatgcgcctggtgcggttatcgtccagcaaaatattacctatgcgccacagcagaaattatctctggatctgtatcagccgcagaatattgccagtattggaccaagaccgaccattgtctggattcatggcggcggctggatttcaggttctaaagaacatgcacggggttatttcaagctgctggcggcacagggctataatgtggtatccgtgcaatatcagtttgcgccacaagcgacctatccaagccagttacaccagatcaatcaggcacttgaatttctcgatacctatgcagacacctaccaaatcgatgcccagaacttatatctggccggagattctgccggggcgaatatggccagccattacgccgcgcttttgaccaatcctgtatttgccgaccaatctggtattcagcctcatctgcaacctgctcagcttaaaggtttaatcttgcattgtggaatttatgacttggaagcatttgccagcaaagcacctgaagaaatgaaaattatcgaatggggtgtctttaacctgattcaggcttataccggcgagcgtaaacatgatgccgcatttttaaagcagatttctccgattcagtatattacgccgtcttatccacctgtcctgatcagtggtgggaataaggattttttgaccgatactcagtcactaccatttgtaaaagctttgaaggaacagcaggttgctgtgactgaaatattttatccagagtctaaggcctggctcattcatgaatatcagttttttatggggaaaaaggaaagtcagcaaacctttgtcaaaaccctggattttttacatcagctttcaccttga

SEQ ID NO: 492 - protein, 328 aa, Unknown
  Obtained from environmental sample
  SIGNAL (1)...(22)
MRFFAIHLLLIGSVILSGCQTAQNSKVIAGAFNLTTGLQQKVMDHYAPGAVIVQQNITYAPQQKLSLDLYQPQNIASIGPRPTIVWIHGGGWISGSKEHARGYFKLLAAQGYNVVSVQYQFAPQATYPSQLHQINQALEFLDTYADTYQIDAQNLYLAGDSAGANMASHYAALLTNPVFADQSGIQPHLQPAQLKGLILHCGIYDLEAFASKAPEEMKIIEWGVFNLIQAYTGERKHDAAFLKQISPIQYITPSYPPVLISGGNKDFLTDTQSLPFVKALKEQQVAVTEIFYPESKAWLIHEYQFFMGKKESQQTFVKTLDFLHQLSP

SEQ ID NO: 493 - DNA, 1215 bp, Unknown
  Obtained from environmental sample
atgaagtacattgtcattctaaagaaaggttacaatagagattcacttacagactattgcacaaaagtaggcaagccgtgtgagctacacaatctcgttatcattaacactgacgagtgtacggcaaagattattgctgacttagattgtgtggaatctattgagaaagattctgtatgtacatctgatgaggaattttacaagtcatctcgtactactgataattgggcattgacacgattcaattttacagaacctcaacgagagtatcctgagagttaccgttacaatcgcacaggcaaaggtgttggcatctacgttattgacagtggtgtacgtactactcatcaagagttagtaggacgtgtagaaactatctacagtacccttgaaggtaagcattttgacagtgataatgagctaaacattaaccgtagtcatggtacagccgtagcgtcagcagcagcagggaagaagctaggtattgcaagtgaagctactgtctacaacttattcgtagatttttctatgtcagacattatcaaagcgtttgatactgtattgcaccattacaaaaagtctaagagtgctgctgtacttgtgacatcattctcaactttgtcactagcaatgaaacctatctcagacgcactctaccaagcaggtctcgttcatgtatctagtgcaggtaatcagtctacagatactccaagataccctgctgcattccctcagactatctctgtaggtgctactgacaagcaggacaataaagcatcattcagtaactttggcaataccgtagacgtatatgcacccggagtgaatgtgaaggtagcggatcatgcaagagatgttcgtactcgtattgcaagaggaacctcattctctgcaccttatgttgctggtatcattgcactcatgctagaaggctcagacaagcctcgtaagagtgagcatgtcgataccatacgacaatccttcctagacaatgctgcaagtgcctctaaggcagataagcgtgtgccacatacacgttttgacattgaaccattcaagtttcctaaaccttctcctgtagaaaaaattgtacaaaaggtgtctgacaataaggaatcgtcaactatttcagacaaaggttctaagaagaattacgtcaaagaaattgtagcaggtgttatcctagtagctactatagctgcaattcttctgtaa

SEQ ID NO: 494 - protein, 404 aa, Unknown
  Obtained from environmental sample
  DOMAIN (85)...(345): Subtilase family
MKYIVILKKGYNRDSLTDYCTKVGKPCELHNLVIINTDECTAKIIADLDCVESIEKDSVCTSDEEFYKSSRTTDNWALTRFNFTEPQREYPESYRYNRTGKGVGIYVIDSGVRTTHQELVGRVETIYSTLEGKHFDSDNELNINRSHGTAVASAAAGKKLGIASEATVYNLFVDFSMSDIIKAFDTVLHHYKKSKSAAVLVTSFSTLSLAMKPISDALYQAGLVHVSSAGNQSTDTPRYPAAFPQTISVGATDKQDNKASFSNFGNTVDVYAPGVNVKVADHARDVRTRIARGTSFSAPYVAGIIALMLEGSDKPRKSEHVDTIRQSFLDNAASASKADKRVPHTRFDIEPFKFPKPSPVEKIVQKVSDNKESSTISDKGSKKNYVKEIVAGVILVATIAAILL

SEQ ID NO: 495 - DNA, 447 bp, Unknown
  Obtained from environmental sample
atggacaatgtaaaggttgtattttcaacgagcagagggattgtaagccgagccatacgcaagttcacatggtcggactggtctcacgttggataccttacacccaaccaaactgttattgattctactttcatgcttggtgttgcagaaaaaccatttgaagaatgggttaatgactacagtaaaaccgaaatactctctatacctcatagagaccccggcgagtttgattatacaattcgtcagcaaatgggtaaaccttacgactttggtggtgtatttggtttcattgctcgatcaggaaaatggaatgacccggataggtggttttgtagtgagttaattgcggatacattcgataaatcgggaggcgtagagtttcctaaaggtttatataagattagtcccgcgctactttacacaatgttgtggatgataaaagagtaa

SEQ ID NO: 496 - protein, 148 aa, Unknown
  Obtained from environmental sample
MDNVKVVFSTSRGIVSRAIRKFTWSDWSHVGYLTPNQTVIDSTFMLGVAEKPFEEWVNDYSKTEILSIPHRDPGEFDYTIRQQMGKPYDFGGVFGFIARSGKWNDPDRWFCSELIADTFDKSGGVEFPKGLYKISPALLYTMLWMIKE

SEQ ID NO: 497 - DNA, 876 bp, Unknown
  Obtained from environmental sample
atgttccgcgagacccggccggcgtcgacgccgacgccgccggcgatcggcgccgtccgcgacgagatcgccgagacggcctccggttcgatcccgctgcgcgtgtaccggccggccagcgtggcgtcggacgcgaccctcccggggctggtctacttccacggcgggggctgggtgatcggggacctcgacacgcacgacgtgctctgccgtcagctcaccgccggggcggggctcaccgtcgtctcggtggactaccggctcgctcccgagcacccgtttccggctgcggtcgacgacgcctgggcggccacgcgctgggtcgtcgagcgcgcggaccacctggggatcgacgcgcgccggcttgccgtgggcggggacagcgccggcggcaacctcgccgccgtgacgacgctgctcgcgcgggacgcgggggcgccgtcgatcgcctaccaggtgctgctctaccccgtgaccgacgtcgccgccgaggcgccgtcgtacgacgccttcgccgacggctacctgctgacccgcgccggcatgcgctggttcatcgagcactacctgccgtcccggcgcgacgccgccgactggcgcgtctcgccgctgcgcgccccctcgctcgcggggctgccgccggccctgatcgtgaccgccgggttcgatcccctctgcgacgagggcgaggcctacgcgcgcgcgctccgcggtgccggcgtccgcgtggactacgtccgctatggcggcatgatccacggcttcgtgcccatgggccgcctcatcgagacgggcaaccgtgctgtcgcgcacatcgccgcctcgctgcgcgacgccctgaccgcgacgggccaggcggcggcgccggtgagataa

SEQ ID NO: 498 - protein, 291 aa, Unknown
  Obtained from environmental sample
MFRETRPASTPTPPAIGAVRDEIAETASGSIPLRVYRPASVASDATLPGLVYFHGGGWVIGDLDTHDVLCRQLTAGAGLTVVSVDYRLAPEHPFPAAVDDAWAATRWVVERADHLGIDARRLAVGGDSAGGNLAAVTTLLARDAGAPSIAYQVLLYPVTDVAAEAPSYDAFADGYLLTRAGMRWFIEHYLPSRRDAADWRVSPLRAPSLAGLPPALIVTAGFDPLCDEGEAYARALRGAGVRVDYVRYGGMIHGFVPMGRLIETGNRAVAHIAASLRDALTATGQAAAPVR

SEQ ID NO: 499 - DNA, 1689 bp, Unknown
  Obtained from environmental sample
atgggactgttcgattacaaaaatgccgacggcaaagcgctgtacagcgatgccatcgccctgacgctgtatgcctacacgccgactggccaagccttgcccggtacaggctggaagccgatcggcgccacggcgctgggctatcagggcaaggtcggggcacagggcacgttcttcggcgagaaggacggcttcaccagcgccgaagccgaagtgctcggcaagtacgacgccgcgggcaagctgatcggcatcggcgtggccttccgcggcaccggcgggctgggttacagcgacaccttcggcgacatgaaaaacaatctgctggctgccattggcccgtcggactacgccactcagtacgcgaaaaacgccttcgacaacctgctcaaatcggtggcggctttcgctgtcgcccacggcattgcggccaaggacgtacttgtcagcggccacagcctcggcggcctcggggtcaacagcgtggcagagttgagcgcgagcaactggggcgggttcttcaaggacgccaactacatttcgttcgcctcgccgacccagagcagcaccggcaccaatgtgctgaacatcggttacgagaacgacccggtgttccgcgtgctcgacggcaccacgttcagcaccgcgtcgatgggcaagcacgacaagccgcacgattcgaccaccgacaacatcgtcaacttcaacgacaactacgcgtccaccgcgcagaacctggtgccgttcagcattgccaatccgctgaactggtcggcccacagctcgctggggtacgccgacggcctgaatcgggtgatcgcgtcgaaattctacggcctgacgcacaaggactcgacgatcatcgtctccaaccttgagcaagcgtcgcggggcaagacctgggtcgaggatctgggccgcagcggcgagccgcacaccggcagcacgttcatcatcggcaccgacagcggcgactggctcaagggcggggcgggcaacgacttcctcgaaggcctgggcggcgatgaccgtttccgtgatgacggcggtttcaacatcctgctcggtggccagggccacaataccttcgagctgcaaaagccgttgcagaacttcagcttcgccaacgacggcgacggcacgctgtacgtgcgtgacgcctacggcggcatcagcatgacccgcgacatcggcgcgctggtgagcaaggagtcgggttcgtggtggggcagcaaggaaatcacctggacggtcaccgccaaaggcctggccaacggtgccgaactgagccagtacaaccattcgctcagcggcggtgccatgggcgacaccctgaaagccaccgccgacggcgactggctgttcggcctggccggcaacgatcacctgcaaagcgacaaggcccacgtgaccttcgtcggcggtgccggcaatgacgtgatgagcgcggtgggtggcaacaacaccttcctgttcagcggcgccttcggcttcgacgcgatcaatggctaccagggcagcgacaaactggtgttcctcggcgtcgaaggcgcggggcagggctacgactacaagcaacacgcgtcgcagtccggcagcgataccgtgctgaagattggcgactttgccgtgacgctgatcggggtcggtgtggctaacctgtcggattcgagtttcgtcttcgcctga

SEQ ID NO: 500 - protein, 562 aa, Unknown
  Obtained from environmental sample
  DOMAIN (82)...(212): Lipase (class 3)
MGLFDYKNADGKALYSDAIALTLYAYTPTGQALPGTGWKPIGATALGYQGKVGAQGTFFGEKDGFTSAEAEVLGKYDAAGKLIGIGVAFRGTGGLGYSDTFGDMKNNLLAAIGPSDYATQYAKNAFDNLLKSVAAFAVAHGIAAKDVLVSGHSLGGLGVNSVAELSASNWGGFFKDANYISFASPTQSSTGTNVLNIGYENDPVFRVLDGTTFSTASMGKHDKPHDSTTDNIVNFNDNYASTAQNLVPFSIANPLNWSAHSSLGYADGLNRVIASKFYGLTHKDSTIIVSNLEQASRGKTWVEDLGRSGEPHTGSTFIIGTDSGDWLKGGAGNDFLEGLGGDDRFRDDGGFNILLGGQGHNTFELQKPLQNFSFANDGDGTLYVRDAYGGISMTRDIGALVSKESGSWWGSKEITWTVTAKGLANGAELSQYNHSLSGGAMGDTLKATADGDWLFGLAGNDHLQSDKAHVTFVGGAGNDVMSAVGGNNTFLFSGAFGFDAINGYQGSDKLVFLGVEGAGQGYDYKQHASQSGSDTVLKIGDFAVTLIGVGVANLSDSSFVFA

SEQ ID NO: 501 - DNA, 1650 bp, Unknown
  Obtained from environmental sample
atgtccaaccccctcgaagacccgctttactacctgcataacttccagcaagtgctcgattggctggggcagcgctatgccgatgtgctggatgacgaagaacagcggtttatggcgcagttcgcccagttgccacaaccggcccaggccttgttggtgcggatggtgatgcgcaagggcgtgcattttcgcgcgagcaagctcaactacggcgagatcggcccgatcgacgtggccgtgcagccgttgctggcccacggctgggtcagcgagcagggcctgctgtcgattgatgaactgtggggccagttgcaaaaaggcgaggtgctgcaggcgttcaagccgtggatcgagcagcccaggggcaagaagtccgactggctgccggatttatccagtcatttcaacgaaccccgtacgtttgcgcagtggtgtcctgcactggacgagcggctttacagcctcacggtgatgggcctgtgtgaccgcctgcgcctgatgttcttcggcaacctgtaccaggactggtcggagtttgtactggcggacctggggatctacacctacgagaaggtcgagttctgcgctgaatcccgggggctgcgccatcgtgacgatgtggatggcctgctgttcctgcaccagtgccaacaggccttcgaggcgggccaggcgctggaggaggtgctggcgcagattgccacgttgagcaccgacaacccctggctggaaaagcgacgggccaagctgctgttccagatcggccagcattgcgaacggctcgccgaactgacgctggccgaagtgatctatcgcggctgtccctatcccggcgcgcgcgcacgcctgatccgggtactggaacgccaggaggatttcgcccaggcgatggccctggccctggaggcccaggccgccccacagagcgcggccgagcagcaacacctgctgcgggtgctgccgcggttgcggcgcaagctgggtgagccggcgcagcccaggcccaagccccaggtgatccagcgcctggacctggaactgccattcccgcaaccgctggcagcggtggagttgtgtgtgcaggcgcacctgggggatcaagaggggccggtgcactacgtggaaaacaccctggtcaactcgctgttcggcctgctgtgctggccggcgatcttcgcgccgttgcccggctcgttctttcacccgttccagcgcgggccggtggatttgcacagtgaggacttccagccgcgccgcgccgagttgtttgccgcctgcctggagcaactgcacgaccagcgctacaaaagcacgatccgccagcgctacgccgaaaaatgggggatccagtcgccgtttgtgttctggaatgtgttgagcgaagaactgctcgaacaggccctcgcttgcttgcccgccgaacatctgcggcactggttcgagcgcctgttgctggacatccgcgccaaccgcgccgggatgccggacctgatccagttctggccggcgcaaaaaacctaccgcatgatcgaagtcaaaggcccgggcgatcgcctgcaggacaaccaactgcgctggctggagttctgtggcgagcaccagatgccggttaccgtgtgttatgtgcgctgggcggagcagggcgcttga

SEQ ID NO: 502 - protein, 549 aa, Unknown
  Obtained from environmental sample
MSNPLEDPLYYLHNFQQVLDWLGQRYADVLDDEEQRFMAQFAQLPQPAQALLVRMVMRKGVHFRASKLNYGEIGPIDVAVQPLLAHGWVSEQGLLSIDELWGQLQKGEVLQAFKPWIEQPRGKKSDWLPDLSSHFNEPRTFAQWCPALDERLYSLTVMGLCDRLRLMFFGNLYQDWSEFVLADLGIYTYEKVEFCAESRGLRHRDDVDGLLFLHQCQQAFEAGQALEEVLAQIATLSTDNPWLEKRRAKLLFQIGQHCERLAELTLAEVIYRGCPYPGARARLIRVLERQEDFAQAMALALEAQAAPQSAAEQQHLLRVLPRLRRKLGEPAQPRPKPQVIQRLDLELPFPQPLAAVELCVQAHLGDQEGPVHYVENTLVNSLFGLLCWPAIFAPLPGSFFHPFQRGPVDLHSEDFQPRRAELFAACLEQLHDQRYKSTIRQRYAEKWGIQSPFVFWNVLSEELLEQALACLPAEHLRHWFERLLLDIRANRAGMPDLIQFWPAQKTYRMIEVKGPGDRLQDNQLRWLEFCGEHQMPVTVCYVRWAEQGA

SEQ ID NO: 503 - DNA, 885 bp, Unknown
  Obtained from environmental sample
atgaaggaaacatatcctgagtatagggttgaaccttttgaattgggtgattctgaaagcaaagtaggttgtcttctttttcacggctacacggggtctcctctggacttgttcccagtggccaagatatgcgaaaagtatgggtggcatgttagggctgttaggcttccgggccatggaagacccattgaagaactaatcaaggtcaagcacactgattggttgcgggctgctgaaaaagaatacgaggaattcgccaaaaacaaggaaagagttattttagttggtcattccttgggtaacgtcttgatttttcatctcgatgtaaagtaccgggaagaaaagaagataaccaatcttgtttctatttcgcccccggttgttattaggaaaggctggatgcttccttttgttggtttggcaaagatatttgttaggcacatagattattctgagattgcgtttaaagacaagaaaataatgcaacacccgttgtatgactacttgaggttcacgtacaagaaatttcctttaggtattattaaggagttagggaaggcggttgagtacggtgtcaagcttgtgcctttgctcgagactgatgtcattgttctttttggtaaggaagatgatgtcgtggatccattgtcgggatacgaaatcttgatgaaagcaaagagcaggcacaagtccttggtgatgcttgagggaatgcatgtgccaatgcttgacattgactataaagcgtttcaagaaagcctgatctcgtatttcaatggcataagcgagaaaaaacttggctttgaagatactttcgacatttttgatttgtttgatgaggccgcccggataactaatattgctcttggtaagctaaaaggttga

SEQ ID NO: 504 - protein, 294 aa, Unknown
  Obtained from environmental sample
MKETYPEYRVEPFELGDSESKVGCLLFHGYTGSPLDLFPVAKICEKYGWHVRAVRLPGHGRPIEELIKVKHTDWLRAAEKEYEEFAKNKERVILVGHSLGNVLIFHLDVKYREEKKITNLVSISPPVVIRKGWMLPFVGLAKIFVRHIDYSEIAFKDKKIMQHPLYDYLRFTYKKFPLGIIKELGKAVEYGVKLVPLLETDVIVLFGKEDDVVDPLSGYEILMKAKSRHKSLVMLEGMHVPMLDIDYKAFQESLISYFNGISEKKLGFEDTFDIFDLFDEAARITNIALGKLKG

SEQ ID NO: 505 - DNA, 1254 bp, Unknown
  Obtained from environmental sample
atgactcacaaaaccaagtcgattgcatcgctttccctcatccttatgctgctggctgtgccgttggcgctggcgtcgtcggtaccggtggccgaaccggaagacgttggcttttccgccgagcggctgcaaaggatacacgagttggtcgaccgccatctggaggcggggagtttcgccggcgctgtcactctggtggcgcggcacggccatattgcgcatttcgaggcccacggcctgatggacctcgaaacgagaaagccgatggcgaaggatgccattttccgcatcatgtcgatgacgaagcctgtggtcggcgtcgccgtcctgatgctgatggaagaaggaaaagttcgcctcaacgaccccttgtcgagattcatacccgagcttaaagacctgaaggtcgctgtcgttcagggcgagagtgcggccggagctgaatctcgcttttacacaatcccggcggaccgtgaaattacggttcgggatctgctgactcacacatccggcttcgtcagcggcggcaccagcaatcgcgaagcccagcgcgccagcggcggcattcgaccgaacgacacgctggccacgtacctgccgcggctggcagcggctccgctcgagttccagccgggaacgcgctgggcctatagcgcggcggcgggattcgacgcgctggcacgcgtggtagaggtcgcctccgggcagaccttcgacgaatttgcgcggcaacgcttattcgaaccgcttggaatgaaggacaccttcttctacgccgccgatccgccggtggaccgctttgcaacgctgtatcgacggactgaaagcggattggagaagcagcaagatccgaatttcatgaacggcacatacctttccgggggaggaggactgttcagcaccgccgaagactatcttcagttcgggcagatgctggtcaatggcggcgagttgaacggaacacggctgctcagtccgaggaccgtcgagttgatgcggtccgtctacgctcccgacagcctgccgggacggccagcgggcgaaggctatggcctgagcgtccgcgtgatcaacgattcgattcaaagagggaccatgctctccgacggcgccttcggttggagcggcgcctttgggacccacttctgggtcgatccgaaggagaaggtcgtcggtatttttatgacccaaacctcgacgccggcaatccggccggatctggagaatgccgtgatgcaggccatcatggagtag

SEQ ID NO: 506 - protein, 417 aa, Unknown
  Obtained from environmental sample
  SIGNAL (1)...(25)
  DOMAIN (46)...(417): Beta-lactamase
MTHKTKSIASLSLILMLLAVPLALASSVPVAEPEDVGFSAERLQRIHELVDRHLEAGSFAGAVTLVARHGHIAHFEAHGLMDLETRKPMAKDAIFRIMSMTKPVVGVAVLMLMEEGKVRLNDPLSRFIPELKDLKVAVVQGESAAGAESRFYTIPADREITVRDLLTHTSGFVSGGTSNREAQRASGGIRPNDTLATYLPRLAAAPLEFQPGTRWAYSAAAGFDALARVVEVASGQTFDEFARQRLFEPLGMKDTFFYAADPPVDRFATLYRRTESGLEKQQDPNFMNGTYLSGGGGLFSTAEDYLQFGQMLVNGGELNGTRLLSPRTVELMRSVYAPDSLPGRPAGEGYGLSVRVINDSIQRGTMLSDGAFGWSGAFGTHFWVDPKEKVVGIFMTQTSTPAIRPDLENAVMQAIME

SEQ ID NO: 507 - DNA, 1854 bp, Unknown
  Obtained from environmental sample
atgggtgtgtatgactacaagaacttcagcacggcggattccaaggcgttgttcagcgacgccatggccatcacgctgtactcctatcacaacctcgacaacggtttcgcggtcggctatcagcacaacggcttcggcctcggcctaccggccacgctgatcagtgcgctgatcggcggcaccgactctcaaggggttattcccggaatcccgtggaaccccgactcggaaaaactcgctctcgacgccgtaaagaaggccggctggacgcccatcactgcgtcgcaactgggctatgacggcaagaccgacgtgcgtggaaccttcttcggtgaaaagcccggctacaccagtgcccaagtggaaatcctcggcaagtacgacgcccagggccatctcacggaaatcggcatcgcctttcgcggcaccagcggcccacgggaaatcctcatcggcgactccatcgccgacgccatcaatgacctgctcgccgcgttcggtcccaaggattacgccaagaactacgtcggcgaagccttcggcaacctgatgaacaacgtggtggcctttgccaaggccaacggcctcaccggcaaggacgtgctggtcagcggccacagcctcgggggcctggcggtcaacagcatggcggacctgagcggcagcaagtggggcgggttcttccaggactccaactacatcgcctacgcctcgccgacccagagcagcaccgacaaagtgctcaacgtcggctacgagaatgacccggtgttccgcgcgctcgacggctcgaccttcaccggggcatcgctgggcgtgcacgacgcgtcgaaagtgtcggccaacgacaacatcgtcagcttcaacgaccactacgcctcgaacgcgtggaatgtgctgccgtattcgatcgtcaacatcccgacctggatctcgcacttgccgacggcttacggcgacggcatgaaccgggtcatcgagtcgaagttctacgacctcaccagccgtgactcgacgattatcgtggccaacctgtcggacccggcgcgggccaacacctgggtgcaggatctcaaccgcaacgccgagccccacaagggcagcaccttcatcatcggcagcgacggcaacgacctgatccagggcggcagcggtaacgattatctggaaggccgtgccggcaacgacaccttccgcgacagcggcggctacaacatcatcctcggtggttcaggcaacaacaccctcgagttgcagcagtcggtgaacaagttcgacttcgccaacgacggcgccggcaacctgtacatccgcgatgccaacggtggaatcagcatcacccgtgacatcggcagcatcgtcaccaaggagccgggcttcctctggggcctgttcaaggacgacgtgacccacagcgtgaccgccgatggcctgaaggtcggcaacaacgtcacccagtacgaatcgagcgtgaagggcaccagcggcgccgacaccctcaaggcccatgccggtggcgactggttgttcggcctggacggcaacgatcacctgatcggtggcgcgggcaacgacgtgttcgtcggcggcgccggcaatgacctgatggaatcgggtggcggtgcggatacgttcctgttcagcggcgcgttcggccaggaccgggtggtgggcttcaacggcaacgacaaactggtgttcctcggcgtgcagggcgtgttgcccggcgatgacttccgcgcccatgccacgtccgtggggcaggatacggtgctgaagtttggcgctgattcggtgacgctggtcggtgtttcgctgagcagtctgaacgccgatggcatcgtgatcgcctga

SEQ ID NO: 508 - protein, 617 aa, Unknown
  Obtained from environmental sample
  DOMAIN (510)...(527): Hemolysin-type calcium-binding repeat (2 copies)
  DOMAIN (133)...(265): Lipase (class 3)
  DOMAIN (381)...(398): Hemolysin-type calcium-binding repeat (2 copies)
MGVYDYKNFSTADSKALFSDAMAITLYSYHNLDNGFAVGYQHNGFGLGLPATLISALIGGTDSQGVIPGIPWNPDSEKLALDAVKKAGWTPITASQLGYDGKTDVRGTFFGEKPGYTSAQVEILGKYDAQGHLTEIGIAFRGTSGPREILIGDSIADAINDLLAAFGPKDYAKNYVGEAFGNLMNNVVAFAKANGLTGKDVLVSGHSLGGLAVNSMADLSGSKWGGFFQDSNYIAYASPTQSSTDKVLNVGYENDPVFRALDGSTFTGASLGVHDASKVSANDNIVSFNDHYASNAWNVLPYSIVNIPTWISHLPTAYGDGMNRVIESKFYDLTSRDSTIIVANLSDPARANTWVQDLNRNAEPHKGSTFIIGSDGNDLIQGGSGNDYLEGRAGNDTFRDSGGYNIILGGSGNNTLELQQSVNKFDFANDGAGNLYIRDANGGISITRDIGSIVTKEPGFLWGLFKDDVTHSVTADGLKVGNNVTQYESSVKGTSGADTLKAHAGGDWLFGLDGNDHLIGGAGNDVFVGGAGNDLMESGGGADTFLFSGAFGQDRVVGFNGNDKLVFLGVQGVLPGDDFRAHATSVGQDTVLKFGADSVTLVGVSLSSLNADGIVIA

SEQ ID NO: 509 - DNA, 1854 bp, Unknown
  Obtained from environmental sample
atgggtgtgtatgactacaagaacttcggtacggcggaatccaaggcgctgttcagcgacgccatggccattacgctgtattcctatcacaacctcgataacggctttgccgtcggttatcagcacaacggcttcggcctcggcttgccggccacgctggtgaccgcgctgatcggcggcacggattcccagggagtgatccccggtattccgtggaatcccgattcggaaaaagccgcactcgacgcggtgaaaaaagccggctggaccccgatcaccgcctcgcaactgggttacgaaggcaagaccgatgtccggggcaccttcttcggcgaaaaggccggctacaccagcgcccaggtggaaatcctcggcaaatacgacgcgcagggccatctcacggagatcggcatcgcctttcgcggcaccagcggcccacgggaaatcctgatcggcgattccatcggtgacgtgatcaacgatttgctcgccgcgttcggccccacggattacgccaggaactacgtcggcgaagccttcggcaacctgatgaacattgtggtggccttcgccaaggccaacggcctgagcggcaaggacgtgctggtcagcggtcacagcctcggcgggctggcggtcaacagcatggcggacctgagcaccagcaaatggggcgggttcttccaggattccaactacatcgcctacgcctcgccaacccagagcagcaccgacaaggtgctcaacgtcggctatgaaaacgacccggtgttccgcgccctcgacggctcgactttcaccggtgcctccctcggcgtgcacgacgcgcccaaggagtcagcgaccgacaacatcgtcagtttcaacgaccattacgcctcggcggcgtggaacgtgctgccgttctcgatcgtcaacattccgacctggatctcacacctgccgaccgcctacggcgacggcatgaaccgggtgatcgagtcgaagttctacgacctgaccagcaaggattcgacgatcatcgtcgccaacctgtcggatcccgcgcgggccaacacctgggtgcaggacctgaaccgcaacgccgaaacccacaagggcagcacgttcatcatcggcagcgacggcaatgacctgatccagggcggcagcggcaacgattatctggagggccgcgccggcaatgacaccttccgcgatggcgggggctacaacgtcatcctcggcggtgccggtaacaacaccctcgatttgcaacagtcggtgaacaagttcgacttcgccaacgacggcgccggaaacctgtacatccgcgatgccaacggcggcatcagcatcacccgcgacatcggcagcatcgtcaccaaggaaccgggctttctctggggcctgttcaaggacgacgtgacccacagcgtcacggcgaccggcctgaaggtcggcaacaacgtcactcagtacgaatcgagcgtgaaaggcaccagcggcgccgacaccctcaaggccaaggccagcggtgactggctgttcgggctggacggcaacgaccatctgatcggcggggcgggcaacgatgtgttcgtcggcggcgccggtaatgatctgatggagtcgggtggcggggcggataccttcctgttcaacggcgcattcggccaggatcgcgtggtgggttacaccgccaacgacaaactggtgttcctcggcgtgcagggcgtgttgccgggcgacgacttccgcgcccatgccacaacggtggggcaggacacggtgctgaagtttggcgctgattcggtaacgctggtcggggttgccttgaacagcctgaatgccgacgggatcgtgatcgcctga

SEQ ID NO: 510 - protein, 617 aa, Unknown
  Obtained from environmental sample
  DOMAIN (510)...(527): Hemolysin-type calcium-binding repeat (2 copies)
  DOMAIN (133)...(265): Lipase (class 3)
  DOMAIN (381)...(398): Hemolysin-type calcium-binding repeat (2 copies)
MGVYDYKNFGTAESKALFSDAMAITLYSYHNLDNGFAVGYQHNGFGLGLPATLVTALIGGTDSQGVIPGIPWNPDSEKAALDAVKKAGWTPITASQLGYEGKTDVRGTFFGEKAGYTSAQVEILGKYDAQGHLTEIGIAFRGTSGPREILIGDSIGDVINDLLAAFGPTDYARNYVGEAFGNLMNIVVAFAKANGLSGKDVLVSGHSLGGLAVNSMADLSTSKWGGFFQDSNYIAYASPTQSSTDKVLNVGYENDPVFRALDGSTFTGASLGVHDAPKESATDNIVSFNDHYASAAWNVLPFSIVNIPTWISHLPTAYGDGMNRVIESKFYDLTSKDSTIIVANLSDPARANTWVQDLNRNAETHKGSTFIIGSDGNDLIQGGSGNDYLEGRAGNDTFRDGGGYNVILGGAGNNTLDLQQSVNKFDFANDGAGNLYIRDANGGISITRDIGSIVTKEPGFLWGLFKDDVTHSVTATGLKVGNNVTQYESSVKGTSGADTLKAKASGDWLFGLDGNDHLIGGAGNDVFVGGAGNDLMESGGGADTFLFNGAFGQDRVVGYTANDKLVFLGVQGVLPGDDFRAHATTVGQDTVLKFGADSVTLVGVALNSLNADGIVIA

SEQ ID NO: 511 - DNA, 1065 bp, Unknown
  Obtained from environmental sample
atgccgcgagcggggctggcctgtgaccacttgcgggagtctgcggtgacatcgacgtcgtcctcggcttcagtcccttccgacggcagcgtccaacgccaggtcgatccagagctgcagcccattctggtgcgcatgctggcgcggatggcagagcggccgccgctgggaacctcgaccggggccgagatgcgggcgcgcttcagcgaggatgtcgcctcctggaacgccgatccgccgccgctggcctgcatcgagaatcgcacggtgcccacggctgcacgcgcggtgccggtgcggatctactcggcagcaccccggaccgagccgcagccggcgatcatcttcttccacggcggtggctgggtggttggcgacctcgattcgaacgagcgcgcgttgcgcgtgctcgccatcgaaagcggggtcaccgtcgtctcggtggactattgcctggcgcccgaaaatccgtttccggcgccgctcgacgaatgcctggcggtaggacgctggatccaccggcacggcacgcaatggggaatcgatgtggaccggctggcattcggcggggattcggcgggcgccaacctgtcgctggctgcggcgctcgacctgcgcgatgcgggcgagacctggttgcgctacctgttgctcatctacggcgcctacgcctgggacagcgatacggagtcgcaccggctgtttggcgacggcgcgatgggatttggtaccgaggcgatggacgcgctgtgggcgatgtacctgggcggacgcgcgcaggcctgcaatccgcgcgccgcgcctttgcatgccgaactccgcggcctgccgcccgctcatgtcgtggccggcggactcgatccgctgcgcgacgacagccggcggctggcggcacggctgatcgaggccggcgtcagcgtcgaataccgcgagtatcccggtgtcgtgcacggcttcatgtcgatgacgcgcgacctgtcggtcgcccggcgcgccacggcttgcgcggccgattctctacgaggcgccctgtcgccgcgcgcgccgacggtcccgcggccgtga

SEQ ID NO: 512 - protein, 354 aa, Unknown
  Obtained from environmental sample
MPRAGLACDHLRESAVTSTSSSASVPSDGSVQRQVDPELQPILVRMLARMAERPPLGTSTGAEMRARFSEDVASWNADPPPLACIENRTVPTAARAVPVRIYSAAPRTEPQPAIIFFHGGGWVVGDLDSNERALRVLAIESGVTVVSVDYCLAPENPFPAPLDECLAVGRWIHRHGTQWGIDVDRLAFGGDSAGANLSLAAALDLRDAGETWLRYLLLIYGAYAWDSDTESHRLFGDGAMGFGTEAMDALWAMYLGGRAQACNPRAAPLHAELRGLPPAHVVAGGLDPLRDDSRRLAARLIEAGVSVEYREYPGVVHGFMSMTRDLSVARRATACAADSLRGALSPRAPTVPRP

SEQ ID NO: 513 - DNA, 900 bp, Unknown
  Obtained from environmental sample
atgagtccggcgacgcgacagcagggctcgtccgcgcttcagctccgattctggaaggggcaggcgctcggcaacgattacttgatcgtcgatcgcgccgagctggccggcccgctgtcgccagcgcgcgccatcttgctctgtgaccgccaccgcggcgccggcgccgatggcgtgctcgtcgccgagctcgacacgcgcccgttcggtctccgcatcatcaaccccgacggtacggaagcggaaaagagcggcaacgggcttcgcatcttcggcgcattcctatacggccgctcgctcgtgcggcgcgacgagtggttcgaggttcagctgccgtacgagactgtcgccatgcgcgtcgaagcccagctcgccgccggcgcggtcctcatccgtgcacggatgggcggcgcgcgcttcgacggcgccgccgtagcattcacggcggagcctggcgaagcgagcggtttcgcgctgccgctgccggacggcgacagcgctgtcatccacacggtctcgctcggcaacccgcactgcgtcgtgttcgtcgacgcgctcgaccgcgccgacttcctcgcccgcgcgccgcagctgtgcacgcaccccgcgttcgcgcacggcaccaacgtgcagttcgcgcgtgtggccggcccgcgcgagatcgaagcctggatctgggaacgcggtgcgggcgaaacgctcgcctccggctcgagcgcatgcgccgtcgccgcggccgccgcgcgccgcggcttcgtgcccgttggaccgctcgtcgtccgcatgcccggtggcagcgtcgacatcaccgtccgtcccgactttcacatcgaactgctcgggcccgcccagatggtctacgaggctcgcctgctcgagggcatcgccgccgactggtag

SEQ ID NO: 514 - protein, 299 aa, Unknown
  Obtained from environmental sample
  DOMAIN (17)...(141): Diaminopimelate epimerase
  DOMAIN (170)...(286): Diaminopimelate epimerase
MSPATRQQGSSALQLRFWKGQALGNDYLIVDRAELAGPLSPARAILLCDRHRGAGADGVLVAELDTRPFGLRIINPDGTEAEKSGNGLRIFGAFLYGRSLVRRDEWFEVQLPYETVAMRVEAQLAAGAVLIRARMGGARFDGAAVAFTAEPGEASGFALPLPDGDSAVIHTVSLGNPHCVVFVDALDRADFLARAPQLCTHPAFAHGTNVQFARVAGPREIEAWIWERGAGETLASGSSACAVAAAAARRGFVPVGPLVVRMPGGSVDITVRPDFHIELLGPAQMVYEARLLEGIAADW

SEQ ID NO: 515 - DNA, 870 bp, Unknown
  Obtained from environmental sample
atgcgcgcggcgctgctcctcgtgctggcggtggcggcggggggctgttcgccgcgcaggatggcggaaggtctgctgctgggcagccagttcgtccgcaccgccgacctgtcctacggcggggatgcgcggcagcggctggacgtgtaccggtcgcgcacggtgcggcagggggtgccggtggtggtgttcctctacggcgggcgctggcagagcggaagcaaggacgagtaccggctgctgggcgacgcgctcacccggcgggggatggtggcggtaatcccggagtaccggctgtacccgcaggtgcgctttcccgcctgggtgcaggacgccgccctggccgtgcgctgggcccgcgacaacgccgcccgctacggcggcgacccggacaacctgatcgtggtggggcactccgcgggcgcgcacacggcggcgctgctggcgctggacgagcgctggctccgagaggcgggagtgccggcgggcgccgtgcgcgggttcgccgcgctggccgggccggtggacacggtgtggacggatgccgacgtgcaggcgctgatggggccggcggagggatggccggcaacgtatcccgccacgcacgtggatgggacggagcccccgcttctgctgctgcacggcgggggcgaccgcacggtttcgaccgggagctcggtgcggctggccgcgcgcatccgggagcgcggcggatgcgcccgcgccatcctctaccccggtgtggggcacgtgcagatcatcgtggcggcggcggtgcccggcgtctcgtccgcgcccgtgctggccgacctgaccacgttcgttgaagatccgcgcgcatttgcgtgcccgggcggacggccccggtga

SEQ ID NO: 516 - protein, 289 aa, Unknown
  Obtained from environmental sample
  SIGNAL (1)...(22)
MRAALLLVLAVAAGGCSPRRMAEGLLLGSQFVRTADLSYGGDARQRLDVYRSRTVRQGVPVVVFLYGGRWQSGSKDEYRLLGDALTRRGMVAVIPEYRLYPQVRFPAWVQDAALAVRWARDNAARYGGDPDNLIVVGHSAGAHTAALLALDERWLREAGVPAGAVRGFAALAGPVDTVWTDADVQALMGPAEGWPATYPATHVDGTEPPLLLLHGGGDRTVSTGSSVRLAARIRERGGCARAILYPGVGHVQIIVAAAVPGVSSAPVLADLTTFVEDPRAFACPGGRPR

SEQ ID NO: 517 - DNA, 930 bp, Unknown
  Obtained from environmental sample
atgaaaaaaacagcacgtatccttaccgttttgagcctgctcgcattatcagttccatctatggcgcaaacagaaaccatgaacctttggccggaaggcaaagtccccaattttaaaaagagtgatgtagaagagaaatcggtcaccgacgcacagggcatcctgcggatcagcggcgtaacggttcctacgattacagcttacattgcaccgaaagataaagcaaccggagcggcggtgatgatctgcccgggcggcggttacggcatattggcggcttcgcacgaaggcagtgattttgccaaatggttcaatgaacgtggtatttcggcatttgtcctgaaataccgcctacccaacgaaaaagcgatggctcatcagcacgaagtcccattaatggacgccatgcagggcatgaaactgatccgccagaatgccggcaaatggggcatcgacgtgaacaaaattggagtgatgggtttttcagcgggcggccacctggcagccacgatttcgacacattacaatatgggtgaaaaagcttcccccgacggcaaaccaaacttttcgatactcatttacccggtgatctcgcttacacccgccctcgcacacggaggctcacgcgacaacttactcggacctgaaaaatcggacgagctgatcaaatactattccaacgaattgcaggtatccgatcagaccccgccggcattcctcgttcacgctatggacgacacgggcgtccccgtcgagaacagcatcgaatattacctggcgctgaaaaagaaaaagatcccggccgaaatgcacttgtacccgaaaggtggccatggctacggcatgcgcaccgaaggtaaaggatctctcggtggttggcccgccgcaatggaaggctggctgaaagcgatgggataccagaaaaattga

SEQ ID NO: 518 - protein, 309 aa, Unknown
  Obtained from environmental sample
  SIGNAL (1)...(22)
MKKTARILTVLSLLALSVPSMAQTETMNLWPEGKVPNFKKSDVEEKSVTDAQGILRISGVTVPTITAYIAPKDKATGAAVMICPGGGYGILAASHEGSDFAKWFNERGISAFVLKYRLPNEKAMAHQHEVPLMDAMQGMKLIRQNAGKWGIDVNKIGVMGFSAGGHLAATISTHYNMGEKASPDGKPNFSILIYPVISLTPALAHGGSRDNLLGPEKSDELIKYYSNELQVSDQTPPAFLVHAMDDTGVPVENSIEYYLALKKKKIPAEMHLYPKGGHGYGMRTEGKGSLGGWPAAMEGWLKAMGYQKN

SEQ ID NO: 519 - DNA, 1197 bp, Unknown
  Obtained from environmental sample
atgaaatatgaaaataattatccatgtcttttcatacatggtcttgcagggtatggtgaccaagattttctcgataagtttttaagttactggggacctggttctaggaatcttatgaagcatctaagaaaacagggaatcgaatgttataaccctacacttggaccttttgatggtgcatgggatagatgctgtgaactctatgcttatatttatggtggcacagttgattatggtaaggtacacagtcgaaaacatcatcataaacgttatggaagaacctatgcacatggtgttttggaggatcttggtaaaactgaagctcataaaaaggtaaatctttttggtcattcttttggtgcccctactgtaaaacagtttatacatcttttaataaatggatcagaggaggagcgtgcagccacaccagaagaagaactgaatcctctttttaaaggtgggcagggcgatattattcatactgtgaccacactctctggtgttaataatggaacagctcttgcaaacttttttggacctaaatctcgaagtgtaattgtaggaactctttttatgtttaattcacttcttaaggatactcagttccctaaactttgggacttccattttcaaaaatggggtgttatggatttgcctgagaatatacatacacataaactttccaatccattggaaggacttaagggttcaaagatttactgtttaaataagattgataatattgcatatgaaatgcgagtagactatgtacaggacgtaattaatccttctcaaacaatgtcagaagagatttattatttctgtcagagagcttgtaattcatatgaaacctttgatggttatcagcttcctcatttaaaaggaaatccagtgtgtactttacctggatatattacaggttggttccatcctaataatttgaaaaagtatggtgtagataaaagctggcttccaaatgatggtttcgttaatgtaaagggacaaggtgctccttatggttgtccttatgaagatggagaaattggcaagaccgatttcaaaccgggaatttggtacaatcttcctgtaataaaaggagatcatttagtttggaatggaatgagtggtaaaaagagagaccattttgaacgttacgacaaaatgattcatttgtttagaactcttcctgacgcataa

SEQ ID NO: 520 - protein, 398 aa, Unknown
  Obtained from environmental sample
MKYENNYPCLFIHGLAGYGDQDFLDKFLSYWGPGSRNLMKHLRKQGIECYNPTLGPFDGAWDRCCELYAYIYGGTVDYGKVHSRKHHHKRYGRTYAHGVLEDLGKTEAHKKVNLFGHSFGAPTVKQFIHLLINGSEEERAATPEEELNPLFKGGQGDIIHTVTTLSGVNNGTALANFFGPKSRSVIVGTLFMFNSLLKDTQFPKLWDFHFQKWGVMDLPENIHTHKLSNPLEGLKGSKIYCLNKIDNIAYEMRVDYVQDVINPSQTMSEEIYYFCQRACNSYETFDGYQLPHLKGNPVCTLPGYITGWFHPNNLKKYGVDKSWLPNDGFVNVKGQGAPYGCPYEDGEIGKTDFKPGIWYNLPVIKGDHLVWNGMSGKKRDHFERYDKMIHLFRTLPDA

SEQ ID NO: 521 - DNA, 1188 bp, Unknown
  Obtained from environmental sample
atgaaatcgataacatattacaaccaatatccaactgtgtttattcacggatttactggatttggacctgacaacggacttaaccgatattaccgttattggggttcgtttaccaaagaccttatgaaggaacttggcaaaagaggatatgaagtatacaacccatctcttggaccgtttaactccatgtgggatcgttgctgtgatttatatgcctatctttttggcggaacagctgattatggcaaggttcacagtgagaagaatggtcatgcaagatatggaagaacctatccaggagtacttaaggatcttgggggagaaggaaatcataaaaaattcaatcttgttggtcacagctttggaggaccgactgtttgtctgttttctagtctattatattcaggggcacaggaagaaattgatggaactcctgaagaggaactttcacctctattcaaaggtggacatggcgagttactacacacagtaactacactttctggtactaataatggtacttcccttattgagtttattggtgaaccgctacagaagttatgtggttctgcattgatgactatttgtgctactctttcggaaactaaggctatgcagttttatgattttaaaaccgatcattttggaataatgggtaattctgcagatattaaagaaaacaaacttacaaatcctattagtaagtggagcgaaattagagcatatgcagaaagtgatgacaatatttttaaagagatgggtgtagaattctctagaaatatggcggaaaagtattatgagatgataccgtcggtttattattttgcaagaagggcatgtagaactcatactcttccaagtggtagacatatgtttaatgtaaatatgaatccacttttttatttaacttcgcctattattggaagatataaaaataaaagacatggaattgatgaaagttggttccctaatgatggctgcgttccaattagaggtatgaatcctccagagaatatgccacaagtagaatggatagagggtatgacttttgaatctggtctttggcatacaatgcctatagaggacaaggaccaccagtcttttgctggtatgctcgaaccacgttttaaatattttaactattattcagatatgttagaacttttccgcacattgcctgatgcttga

SEQ ID NO: 522 - protein, 395 aa, Unknown
  Obtained from environmental sample
MKSITYYNQYPTVFIHGFTGFGPDNGLNRYYRYWGSFTKDLMKELGKRGYEVYNPSLGPFNSMWDRCCDLYAYLFGGTADYGKVHSEKNGHARYGRTYPGVLKDLGGEGNHKKFNLVGHSFGGPTVCLFSSLLYSGAQEEIDGTPEEELSPLFKGGHGELLHTVTTLSGTNNGTSLIEFIGEPLQKLCGSALMTICATLSETKAMQFYDFKTDHFGIMGNSADIKENKLTNPISKWSEIRAYAESDDNIFKEMGVEFSRNMAEKYYEMIPSVYYFARRACRTHTLPSGRHMFNVNMNPLFYLTSPIIGRYKNKRHGIDESWFPNDGCVPIRGMNPPENMPQVEWIEGMTFESGLWHTMPIEDKDHQSFAGMLEPRFKYFNYYSDMLELFRTLPDA

SEQ ID NO: 523 - DNA, 1335 bp, Unknown
  Obtained from environmental sample
atgactactaaaatctttttaattcacggatggtctgtcaagacaacacaaacatatcaggcgctgcaccttaagttggcagagcagggatatcagctggaagatatttacctcgggcggtatctgtcccttgaaaatcatatcgaaatacgggatattgcaaaagcaatgcaccgtgcattgctggagaggattaccgactggagtcagcctttccattttattactcacagtacgggaggtatggtcgccaaatattggatattgaatcattataaaggaagtattgcaaaacaaaaaccactcaaaaatgtagtgtttctggctgcacctaattttggttcaaggctggcacaccatggacgtaccatgctgggagaaataatggaactgggagaaacagggaagaagattcttgaatctctggagttaggaagtgctttttcgtgggatgtgaatgagcagttttttaatgcgtccaattggaaagataaagaaataaagttctataacctgataggagacagggtcaaaacggatttttttaaatccaaaatttttccagctgcgtttgaaagcgggtcagatatggtgattcgggttgcggcaggaaatcagaactttgtccggtacaggtacgatagtcagaaagatagctttactgttgtcaatgagttgaaaggaattgcttttggtgctctctaccaatatacacattccaatgatgattatggaatcctgaacagcatcaaaaaaagttcaacccttgaaaaccatcaggcactcagactaattgtagaatgtctgaaggtttcgggagataaagaatatgaaaatgttgttgcacagttggctgcagcgacaaaagaaaccagagaaaaacgccagggatatgcacagctggatttccgttttcgggatgatgaaggctttccaatagatgattatgttgtagagctgggagtaatggtaaatggaaaacctaaaccatctaaaacagtagatgacgtgcataagaataaaattacaccaaaccatcttactgtattcattaacctgaaagaactggaacctaatctgaagtactttatcaatattaaatcgatatcggaatcctccatgtatagttacgatcctgctgtcaggactatagagcttgcttctaacgagattacaaaaattatccgtgaggaccatacaacacagattgatgtgatactttcccggactcctgctaaaaaccttttcatgtttcatcgcggagatgatgaagacctacatgtgacatggtcgcggtacggagaaacaaaaagtacaaagcagggaataaaataa

SEQ ID NO: 524 - protein, 444 aa, Unknown
  Obtained from environmental sample
MTTKIFLIHGWSVKTTQTYQALHLKLAEQGYQLEDIYLGRYLSLENHIEIRDIAKAMHRALLERITDWSQPFHFITHSTGGMVAKYWILNHYKGSIAKQKPLKNVVFLAAPNFGSRLAHHGRTMLGEIMELGETGKKILESLELGSAFSWDVNEQFFNASNWKDKEIKFYNLIGDRVKTDFFKSKIFPAAFESGSDMVIRVAAGNQNFVRYRYDSQKDSFTVVNELKGIAFGALYQYTHSNDDYGILNSIKKSSTLENHQALRLIVECLKVSGDKEYENVVAQLAAATKETREKRQGYAQLDFRFRDDEGFPIDDYVVELGVMVNGKPKPSKTVDDVHKNKITPNHLTVFINLKELEPNLKYFINIKSISESSMYSYDPAVRTIELASNEITKIIREDHTTQIDVILSRTPAKNLFMFHRGDDEDLHVTWSRYGETKSTKQGIK

SEQ ID NO: 525 - DNA, 795 bp, Unknown
  Obtained from environmental sample
atgagcgtcgaggtccgcgggagcggccccgacgtggtgctgatccccgggctcgcctcctcgccggaggtctggcaggcgaccgcggaccggctcgacgacacccatcgcgtacatctggtgcaggtgaacggcttcgccggcgcgcccgccggggcgaacgccgaaggcgcggtggtcgcgccgctggtcggggagctgaaccgctacatcgccgagaccgggctgaagcggccggccctgatcggccactcgctgggcggcttcgcggcgctgcggttggcggccgagcatccgcaggcggtgggccgcgtgctggtggtggactcgctgcccttcttcccgctgctgttcagcccggcggcgactgtggaggcggtgaccccgcaggcgaacgccatgcgggacggcatgctggccatgccggccgagcgcttcccggcggtgcaggcggccgggatgggacggctggtcaagaaccccgaagcacgcagcaagcacgtccgcatcggcggcgcctccgaccctgcggtggtcgcgcgcgccatgcacgagatcatgaccaccgacctgcggccccagctgcgcgggatcgttgcgcccgtcaccgttctctacgcctgggaccccgccatgggactcacggtcgaggcctacgaccagctctggcgcggcgcctacgccggactgaagggggcgagcctgacgcgggtggacggcagcttccacttcatcatggacgaccagccggagcgcttctccgcggaggtcgagcggttcctggcggccgagtaa

SEQ ID NO: 526 - protein, 264 aa, Unknown
  Obtained from environmental sample
  DOMAIN (36)...(259): alpha/beta hydrolase fold
MSVEVRGSGPDVVLIPGLASSPEVWQATADRLDDTHRVHLVQVNGFAGAPAGANAEGAVVAPLVGELNRYIAETGLKRPALIGHSLGGFAALRLAAEHPQAVGRVLVVDSLPFFPLLFSPAATVEAVTPQANAMRDGMLAMPAERFPAVQAAGMGRLVKNPEARSKHVRIGGASDPAVVARAMHEIMTTDLRPQLRGIVAPVTVLYAWDPAMGLTVEAYDQLWRGAYAGLKGASLTRVDGSFHFIMDDQPERFSAEVERFLAAE

SEQ ID NO: 527 - DNA, 1095 bp, Unknown
  Obtained from environmental sample
atggaattgaaatataacagattaacaatcaatattcttcggtttgtggttgctctcttgttcctaacaattgcgtggttaatgctgtgctcaaatcaacaagatcgcacagattccagagctgcgatccaaacggaaactcagtacccgttaactgaaaacctgatcagtaatataatggagcagtctccggatcaactgatgctttctcaggatcaagaaccaaagatcactattttacagttaccggggtctttacgtgattctgtgttgccttcatcacttgatgtcagtgtcgatggtgatttggtgatcaacaagaaggttcagcatctatttgatttttatctatctgctttgggtgaggaaagcctggaggttgttgttgctcgaattaagcaaagacttgaactacaacttaagccaccggcattggaacaggcctctgatattttaactgggtatgtacaatatctgaatgagataacggcgataaagcagcaatatgagcaagatttaaagggagaatatacccttgaaaatgtaatcaatgcgcgcagactggttttagatgcccgggctgagtttttagcaccagaggttattgttgtgttttttgaacaaactgaccaatacgaagagtatatgctaggccttgccgctgttacgcaaaatagtgagttaacccaagtacaaaagcagcagactaaagcagagcttgatgcgactgctcctgagtggttgttggcgcaacagcagaatgcaaatcagctaaatgactatcgaagtcaatatcaagagctaaaatcgcaaggtgccacagaagatgaattgagagacttcactcagcagcagttttcacctgaagcggcagagcggctcgcagatcttgaggagcaacggcagcagtggcagctaaggctggatgaataccgagttgaattaggcggcatcataacaacggatatggttgatcagcaacaacaagaacagatagagcagttgcgcgagttatatttttctgagcaagagattaagcgggttagggtattggataatgccttttttactttgaaaagcaccactttagagtga

SEQ ID NO: 528 - protein, 364 aa, Unknown
  Obtained from environmental sample
  SIGNAL (1)...(33)
  DOMAIN (75)...(357): Proteobacterial lipase chaperone protein
MELKYNRLTINILRFVVALLFLTIAWLMLCSNQQDRTDSRAAIQTETQYPLTENLISNIMEQSPDQLMLSQDQEPKITILQLPGSLRDSVLPSSLDVSVDGDLVINKKVQHLFDFYLSALGEESLEVVVARIKQRLELQLKPPALEQASDILTGYVQYLNEITAIKQQYEQDLKGEYTLENVINARRLVLDARAEFLAPEVIVVFFEQTDQYEEYMLGLAAVTQNSELTQVQKQQTKAELDATAPEWLLAQQQNANQLNDYRSQYQELKSQGATEDELRDFTQQQFSPEAAERLADLEEQRQQWQLRLDEYRVELGGIITTDMVDQQQQEQIEQLRELYFSEQEIKRVRVLDNAFFTLKSTTLE

SEQ ID NO: 529 - DNA, 918 bp, Unknown
  Obtained from environmental sample
atggcatatgatcggaagcttccctgggccctggtgctctcggggggaggagcgaaagggcttgcccatgtgggggtcttaaaggttcttgaagctatggatgtgccgtccccctcgcttattgtgggaacctccatgggggctattgtaggggggctctatgcctgtgggtatcgggctacagaactagaagaaatcgcctttcgctttgatattcgggactatcttgatagcaaggtgttccgtatggaagggcccctggggaagcttatgcaaacgggccagattattggccggcttgccacaaaacccgggatcgattcggggaaggcgattttttcttatcttgaaaaacttaccgaggggcgtggggtggaagagacccgtatcccctttcgctgtaacgcggtggatctggtatcgggtcgggaaatcgttttttcccggggaccccttgctctggcgctgcgggcatctatggcctttccgaccttctttgatccggtctacatggacgacatggtgctggtagatggggggcttgtgaataacctggctatctccgtggctcgaaggcggggctttacccatattcttgcggtggatgtgggtatgtttaccctttcccaggctaccaagctccagaccggtccccagatcctctatcggtgcctcgaagtagtagggcatcatatctatcggggagacatggatcgggcaagccttacccttcagccccgggatgatacgagcccctttgcctttgcgcgggctgcccatcttattcggttaggagagcaaactaccctggcccagcgggaacttctcgagcgcttctttacgccagggtggctcaagcggcttacccttcaacgtcaggtgcaacgggtggggaaaatggtccccgccggggagtga

SEQ ID NO: 530 - protein, 305 aa, Unknown
  Obtained from environmental sample
  DOMAIN (11)...(191): Patatin-like phospholipase
MAYDRKLPWALVLSGGGAKGLAHVGVLKVLEAMDVPSPSLIVGTSMGAIVGGLYACGYRATELEEIAFRFDIRDYLDSKVFRMEGPLGKLMQTGQIIGRLATKPGIDSGKAIFSYLEKLTEGRGVEETRIPFRCNAVDLVSGREIVFSRGPLALALRASMAFPTFFDPVYMDDMVLVDGGLVNNLAISVARRRGFTHILAVDVGMFTLSQATKLQTGPQILYRCLEVVGHHIYRGDMDRASLTLQPRDDTSPFAFARAAHLIRLGEQTTLAQRELLERFFTPGWLKRLTLQRQVQRVGKMVPAGE

SEQ ID NO: 531 - DNA, 1308 bp, Unknown
  Obtained from environmental sample
atgaggaaccgcctcgctttagccgccctgtttccggcccttctcctcctcgcgcccgccgcgcccgccgaggcgcccgcggcgcgggtggcggcgccgcggacgctgagcttcgccgcgaggccggaggaggtcggattcgacggcgcgcgcctgaagcggctcaaggactatgtcgccgcctcggtcgcggacgggaagctggcgggggcgacgacgctcgtcgcgcgcaggggcaggatcgtcgccttcgacacctacggccgcaggaccgccggcggcgcgccggtcactcgcgacaccatcttccgaatctattcgatgtccaagccggtgaccggcgtcgcgctgatgatgctgctcgaggagggcaagttccgcctggacgatccggtgacgatgcacatacccgagttcaaggacctcaaggtctcgacgagcttcgacgcagagggcaggccggtcctggaggagatgaagcggcccccgacgatccgcgagctgatgagccattcggccggcttcggctacggcctcggcgccggctcccccgccgacaatctctaccgtgagatcgacccgctgaacgccgggagcatgaaccagttcatcgagcgcgcggcgcggctcccgctcctcttccagccgggcacgcgctaccaatattcgctctccgtcgacatccagggctatctcgtcgagaagctgtcggggaagccgttcgggcggttcctggaggagcgcatcttccggccgctgcgcatgaaggacaccggcttttacctccgccgcgaccagcttccccgcctcgccggcctctacgtcggcggcgcaagcggcggtcttcaggaggcgcagcaggtgttcggctggccgcgtcccgacccgctgcagccgcccggcttcgagtccggcggggcgggtctcttctccacgacgatggactatgcccgcttctgccagatgctgctgaaccgcggcgagctcgacggcgtgcgcatcctttctcccgcctcggtggcgctcatgtcctccaacgctctgccggaggacgtggcgaaggccggcttcggccgcggccgcggcttcggcctcaacttcgaagtcctgaccgaccccgccgccgccggcagccttgccggcaagggcagctaccgctggggcggcgccgccggcacctggttctggatcgacccgaccaacgaggtgattttcgtcggcatggtgcagcgcctcgattactggaagcccgaccacccgaacgtcatgtcgaccaacctcacctatcaggcgctgacgcggccttga

SEQ ID NO: 532 - protein, 435 aa, Unknown
  Obtained from environmental sample
  SIGNAL (1)...(23)
  DOMAIN (55)...(427): Beta-lactamase
MRNRLALAALFPALLLLAPAAPAEAPAARVAAPRTLSFAARPEEVGFDGARLKRLKDYVAASVADGKLAGATTLVARRGRIVAFDTYGRRTAGGAPVTRDTIFRIYSMSKPVTGVALMMLLEEGKFRLDDPVTMHIPEFKDLKVSTSFDAEGRPVLEEMKRPPTIRELMSHSAGFGYGLGAGSPADNLYREIDPLNAGSMNQFIERAARLPLLFQPGTRYQYSLSVDIQGYLVEKLSGKPFGRFLEERIFRPLRMKDTGFYLRRDQLPRLAGLYVGGASGGLQEAQQVFGWPRPDPLQPPGFESGGAGLFSTTMDYARFCQMLLNRGELDGVRILSPASVALMSSNALPEDVAKAGFGRGRGFGLNFEVLTDPAAAGSLAGKGSYRWGGAAGTWFWIDPTNEVIFVGMVQRLDYWKPDHPNVMSTNLTYQALTRP

SEQ ID NO: 533 - DNA, 948 bp, Unknown
  Obtained from environmental sample
atgagcgacccctatgtgaggcccgacgtccgcctcttcctggattattacaacaagcttcccgggccgcgcgcccatgaagtcgggccgaaccaggcgcgggccatgatcctcgcctcgcgccacgtcgccgacgcggaggcgggcgagctggcggtgatcagggaccttgcctgccccggcccggccggggtgacccgccttcgcctgtacgacgccagggagactcgcgaggcgggtccgctcctcctcttcttccatggcggcggcttcgtcttcggcgatctcgacactcacgagccgttctgcgccgaagtggcgcgtcaactcgatctgccgctgctcgcggtcgactataggctggcgcccgagcaccccttcccggccggtgttgaggattgcattgcggcggcgcgctgggcggcggcaagccccccttccctcggccggcaggtcaccggcctcgtcaccgcgggcgacagtgccggcggcaatttcgcgatcgtcgtcggtctcgcgctccgcgacgagcccgccgacgttccggttatcgcgcaatggccgatctacccggccgcggatcccggcaaaagctatccctcctataaggatttcggcgagggctatttcctcagccacgtcgggatggcgtggttcgacgggtgctacaggcccgacaaggccgactggcgctactcgccacttctcaagagccaggtcggaatgccgcccacgctcgtccagaccgcgagcctggacccgatccgcgatcagggccgcgcctatgccgcggcctgcgcagaggcgggggtgccggtcgtcttccgcgaggccgaaggcaacatccacggctatatcaacctgcgcaaggcgatcccctcctccgccgacgacatcgccgcgggcgtcgaggccctgaagatgatcctgaaggcggtgaaggcgtga

SEQ ID NO: 534 - protein, 315 aa, Unknown
  Obtained from environmental sample
MSDPYVRPDVRLFLDYYNKLPGPRAHEVGPNQARAMILASRHVADAEAGELAVIRDLACPGPAGVTRLRLYDARETREAGPLLLFFHGGGFVFGDLDTHEPFCAEVARQLDLPLLAVDYRLAPEHPFPAGVEDCIAAARWAAASPPSLGRQVTGLVTAGDSAGGNFAIVVGLALRDEPADVPVIAQWPIYPAADPGKSYPSYKDFGEGYFLSHVGMAWFDGCYRPDKADWRYSPLLKSQVGMPPTLVQTASLDPIRDQGRAYAAACAEAGVPVVFREAEGNIHGYINLRKAIPSSADDIAAGVEALKMILKAVKA

SEQ ID NO: 535 - DNA, 1026 bp, Unknown
  Obtained from environmental sample
gtgaaacattatgtaattgcactgacaaccgccttcctgctctatacagccttgccggctacggctgcggatacgagccggagctatcccgttccgaacaccgtcagcccggaactgcaaacgctcatcggttccgctccgtttccatactggaacaggcacccggccaatgcggaagaatggaaggcctttgtcaaggaactctcggatgccgccgcgccgggaatacccgtgttgcgggaaaaaatgggcgtcacctccacacccggcgttatggccggggtaccggtcttcaccataaccccgcggaatctgcccgccgccaatgcggatcgcgtgctgctccattttcatggcgggggatatgtgctggggcctggagaaaccggaaccgacgaagccattctgatggcgggagtctccgggtaccgggtcatttccgtggattacagaatggcgccggatcatccttacccggcggccatagacgatgccgtcgcggtctacaaggaacttctcaaaaccgtgcctgccggaaagatcggcgtcttcggcacctccacaggcggaggcatgacgctcatcctggccctgcgcgcgaaagccgaagggttacctatgcccggcgctctcggcgcgggaacgccgtggactgatatgaccaaaaccggtgatacctacttcaccaacgagtatctcgataacgttttggtcagttacgacggatgggtcggtgatgcggccaaaatatacgccgccgggcatgacctgaaagaccccatgctttctccggtgtatggcgatgtttccggctttccacccacactgctgacatcgggcacccgcgacctttttctgagcaacacagtgcgcatgcaccagaagctacggcaagcgggagctacggcggacttgatcgtttttgaaggcatgtcccactgccattactactttcttcctgatgcgcctgaaacccgcttccacttcacggagctcggtaaattcttcggacgtcatttacagtaa

SEQ ID NO: 536 - protein, 341 aa, Unknown
  Obtained from environmental sample
  SIGNAL (1)...(22)
MKHYVIALTTAFLLYTALPATAADTSRSYPVPNTVSPELQTLIGSAPFPYWNRHPANAEEWKAFVKELSDAAAPGIPVLREKMGVTSTPGVMAGVPVFTITPRNLPAANADRVLLHFHGGGYVLGPGETGTDEAILMAGVSGYRVISVDYRMAPDHPYPAAIDDAVAVYKELLKTVPAGKIGVFGTSTGGGMTLILALRAKAEGLPMPGALGAGTPWTDMTKTGDTYFTNEYLDNVLVSYDGWVGDAAKIYAAGHDLKDPMLSPVYGDVSGFPPTLLTSGTRDLFLSNTVRMHQKLRQAGATADLIVFEGMSHCHYYFLPDAPETRFHFTELGKFFGRHLQ

SEQ ID NO: 537 - DNA, 912 bp, Unknown
  Obtained from environmental sample
atggcgtcggtggtcgaacaggcgaacagcgtggaggaccagcgggtcggctacgacggcttcggcgactcgatgccgcgtccgtatgcccgacccgtccgccagctgatcgacggtcccgtcgtgacgcacgtgatcgaccccgacctcgagggggaggtggcgagcgtcttctatctccacggcggcgggtacatgatcggttcgcttcggtcgcaccgtgcctttctggagctcctcagcgcgaagctgggcgtccgggtctacttcccggagtaccgcctggctcctgaacaccggtatccgagcgcagtcgacgacgcggtcggcgcctacgaggcggtgctgcggtcgggtgtcgcgcccaagaccgtggcggtggtcggcgactcggccgggggcggcctcgccttggccgccgtccttgccattcgggatcgttcgatcccgcttcccggagcggtcatcgccctttcgccgtgggccgacatggtgggcaccggggagtcccggaagagccaggagggcatcgatcccatgctggcccaagaggggctggacgagatggcggcggcgtacctgggcccggccgcagcgacgtcgccctatgcgtcgcccgcttacggcgacttcagcggttaccccccgcttctgctccaagtcggcgagtgcgagatcctgcgcgacgacgcactgatcgtggccgaacgggctaccgcggccgatgtgcgtgtccaggtcgaggtgtggcccgagatgacccacgtcttccagacgttcgcgccgctcctgccccccgggcacgaagccctcgaggccctggagcacatgggccggttcattgccgaggcgagcgggatcgcgtccgtctcggcgccgtcggtctcaaggtcgccggctgccggccggtga

SEQ ID NO: 538 - protein, 303 aa, Unknown
  Obtained from environmental sample
MASVVEQANSVEDQRVGYDGFGDSMPRPYARPVRQLIDGPVVTHVIDPDLEGEVASVFYLHGGGYMIGSLRSHRAFLELLSAKLGVRVYFPEYRLAPEHRYPSAVDDAVGAYEAVLRSGVAPKTVAVVGDSAGGGLALAAVLAIRDRSIPLPGAVIALSPWADMVGTGESRKSQEGIDPMLAQEGLDEMAAAYLGPAAATSPYASPAYGDFSGYPPLLLQVGECEILRDDALIVAERATAADVRVQVEVWPEMTHVFQTFAPLLPPGHEALEALEHMGRFIAEASGIASVSAPSVSRSPAAGR

SEQ ID NO: 539 - DNA, 975 bp, Unknown
  Obtained from environmental sample
atgcaggttcgtcttattggccgctggctggccttggccgccgcggtgatggttctggtgcccgccatggccgacgcgcgcgccggtgccggttcgagctcgggcagccgcggcagccggaccaaccaggcgccgcccccgacccagaccgcgccgaccgccaagccggtcgaacgcagcgtgacgccgcaggcgccggcgcagcagccgtcgatggcatcggccccggcggccaacccgcgacccggcttcttcgcccgcaacccgttcctctccggactgatgggcggcctggtcggcgccggcttgctgggcatgctgttcggcggcggcttcggcggcgcagccggcatgggcggcctgctcgtgcagctccttctgatcggcgggctggcctatctgggcgttcgcctgttccgcggctggagcgcgcgaaacgccgctgctgctggcccgtcgtcctatgcctacgccgcggctccgggcggcatgcccgagcagccggcgccacgcgcgaatggcgcgctgctcggcggcgctgctccacttttgatgggcaacgcgtccacgccgctcgccatcgccgagggcgactacaatgccttcgaggccctgttggccgacgtccagtccgcctacagcacgggcaacctcgcgaagatgcgcgagctcgcgacgcccgagatggtcggctatttctcggaagagctctcgggcaacgccagccgcggcgtcgagaacaaggtcgaggcggtcaagctcgagcagggcgacctgtcggaggcctggagcgaagccggcatcgactacgcgaccgtcgccatgcgcttcagcatgctcgacgtcacgcgccggcttgccgacggcacgatcgtcgagggcaacgaccacgtccgcagcgaagcgaccgagatctggaccttcctgcgcagccgcggcggcaagtggatcctgtcggccatccagcaggcgtag

SEQ ID NO: 540 - protein, 324 aa, Unknown
  Obtained from environmental sample
  SIGNAL (1)...(24)
MQVRLIGRWLALAAAVMVLVPAMADARAGAGSSSGSRGSRTNQAPPPTQTAPTAKPVERSVTPQAPAQQPSMASAPAANPRPGFFARNPFLSGLMGGLVGAGLLGMLFGGGFGGAAGMGGLLVQLLLIGGLAYLGVRLFRGWSARNAAAAGPSSYAYAAAPGGMPEQPAPRANGALLGGAAPLLMGNASTPLAIAEGDYNAFEALLADVQSAYSTGNLAKMRELATPEMVGYFSEELSGNASRGVENKVEAVKLEQGDLSEAWSEAGIDYATVAMRFSMLDVTRRLADGTIVEGNDHVRSEATEIWTFLRSRGGKWILSAIQQA

SEQ ID NO: 541 - DNA, 579 bp, Unknown
  Obtained from environmental sample
atgcttgtaaatgaaggatatgcagtctatacatttgactggccaggtcatggaaagagcccaggaaaaagaggtcatacaagcgttgaagaagcaatggaaataatagactttatcatagaggagataaacgataaaccttttctctttggccacagcctcggaggattaacagtgataagatatgcagaaacaaggccagaaaagattagaggagttattgcctcctccccagctctggctaagagcccaaaaacaccctcttttatggttgcacttgcaaaaattcttggagtcttgcttccaagcttaacactctccaatggaatagatcccaatcttctctcaagaaatccagatgctgtaaaaagatacatagaagatcccctggttcatgacagaatttctgccaaactgggaaggagcatattcaagaacatggatcttgctcacagagaagcccacaaaattaaagttccagttctactcttagttgggactggggatgttataactcctccagaaggagctagaaagttatacggggaaatcaaagtggaagataaggaaattgtatag

SEQ ID NO: 542 - protein, 192 aa, Unknown
  Obtained from environmental sample
  DOMAIN (7)...(192): alpha/beta hydrolase fold
MLVNEGYAVYTFDWPGHGKSPGKRGHTSVEEAMEIIDFIIEEINDKPFLFGHSLGGLTVIRYAETRPEKIRGVIASSPALAKSPKTPSFMVALAKILGVLLPSLTLSNGIDPNLLSRNPDAVKRYIEDPLVHDRISAKLGRSIFKNMDLAHREAHKIKVPVLLLVGTGDVITPPEGARKLYGEIKVEDKEIV

SEQ ID NO: 543 - DNA, 837 bp, Archaea
atgaagactgtggaagagtatgcgctacttgaaacaggcgtaagagtgttttatcggtgtgtaatcccggagaaagcttttaacactttgataataggttcacacggattgggggcgcacagtggaatctacattagtgttgctgaagaatttgctaggcacggatttggattctgcatgcacgatcaaaggggacatgggagaacggcaagcgatagagaaagagggtatgtggagggctttcacaacttcatagaggatatgaaggccttctccgattatgccaagtggcgcgtgggaggtgacgaaataatattgctaggacacagtatgggcgggctgatagcgctcttaacagttgcaacttataaagaaatcgccaagggagttatcgcgctagccccggccctccaaatccccttaaccccggctagaagacttgttctaagcctcgcgtcaaggcttgccccgcattctaagatcaccttacaaaggagattgccgcagaaaccagagggttttcaaagagcaaaagatatagaatacagtctgagtgaaatatcagtcaagctcgtggacgaaatgattaaagcatcatctatgttctggaccatagcaggggaaattaatactcccgtcctgcttattcatggggaaaaagacaatgtcatacctccggaggcgagcaaaaaagcctaccaattaataccttcattccctaaagagttgaaaatataccccgatcttggacacaacttgttttttgaaccaggcgcggtgaaaatcgtcacagacattgtagagtgggttaagaatctacccagggaaaatccttaa

SEQ ID NO: 544 - protein, 278 aa, Archaea
  DOMAIN (56)...(268): alpha/beta hydrolase fold
MKTVEEYALLETGVRVFYRCVIPEKAFNTLIIGSHGLGAHSGIYISVAEEFARHGFGFCMHDQRGHGRTASDRERGYVEGFHNFIEDMKAFSDYAKWRVGGDEIILLGHSMGGLIALLTVATYKEIAKGVIALAPALQIPLTPARRLVLSLASRLAPHSKITLQRRLPQKPEGFQRAKDIEYSLSEISVKLVDEMIKASSMFWTIAGEINTPVLLIHGEKDNVIPPEASKKAYQLIPSFPKELKIYPDLGHNLFFEPGAVKIVTDIVEWVKNLPRENP

SEQ ID NO: 545 - DNA, 942 bp, Unknown
  Obtained from environmental sample
atgcgcctccgagcgctgcaggtcgccttctacctggccttcctgctcgcgctgccgagcggccccgccgcggcgcagagccggggcccgctcgagctggcgagggcgccggtgcccgccggcgcgctccgcatcgcctacgggagtgatccgctgcagttcggggagctgcgcctgccggcgacggaggggccgcatccggtggcgatcgtggtgcacggcggctgctgggtcgcgaagctcggaaacctggacgagcgcgccgtcgcgctggacaacatgcgcccgctggccgcggcgctgacggaggcggggatcgcgacctggaacctcgagtaccgccgcctcggccatgtgggcggcggctggccgggtaccttcctcgacgtagccaacgcggcggatcatctgcgcaccctggcccgggagcatccgctcgacctggcgcgcgtgatcgccatcgggcactcggcgggcgggcacctcgccgtgtggctggcggcgcgcggcagggtgccggcgaccagcgagctgcatgcagcggatccgctgccgctgatcggggcggtgaacctcgatgggcccgcggacctgcagagcatgcttccgctgcaggagcgcatctgcggccggccggtcatcaccgagctgatggagggcacgcccgccgagcggccggagcgctaccgcgccacctcgcccctcgacctgctccccctgggagttcgccagaaagtacacgcgggccgcatgttcgccgagcaggccgaggcgtaccaggccctcacgcagcaggcgggcgatccgatcacagcgacgatcatcgccgacgccggccatttcgtgttcatcgatccgcagtcggctgcctggccgcgcgtgctggagagcgttcgccgcctgctgctgatcccggactccgcggcgccggaggagtcgtga

SEQ ID NO: 546 - protein, 313 aa, Unknown
  Obtained from environmental sample
  SIGNAL (1)...(25)
MRLRALQVAFYLAFLLALPSGPAAAQSRGPLELARAPVPAGALRIAYGSDPLQFGELRLPATEGPHPVAIVVHGGCWVAKLGNLDERAVALDNMRPLAAALTEAGIATWNLEYRRLGHVGGGWPGTFLDVANAADHLRTLAREHPLDLARVIAIGHSAGGHLAVWLAARGRVPATSELHAADPLPLIGAVNLDGPADLQSMLPLQERICGRPVITELMEGTPAERPERYRATSPLDLLPLGVRQKVHAGRMFAEQAEAYQALTQQAGDPITATIIADAGHFVFIDPQSAAWPRVLESVRRLLLIPDSAAPEES

SEQ ID NO: 547 - DNA, 1194 bp, Unknown
  Obtained from environmental sample
atgaacaaacgaagtttgcgcaagtgtttgagcgctgtcggtgtcgttgcgatcctgttctcggtgcaacaggtgctagcctatgacgagatcgtgcagaagcaggcctttgagcttgcctcctacacaaccaccggcggggagacgatcaaggacgtccgcatcggctgggaggcctacgggacgttgaacgaggccaaggacaacgtcatcctgattacccacttctattccggcaacagccatgccgccggccgctacaccgccgagggtcctgccggctattggaacgccatcatcggttcaggcaagccgatcgataccgacaaatactacgtcgtgtcgtccgacaccctggtgaatctcggcgccaatgatcccaatgtcatcaccaccggtccggcctccatcaatcccgacaccggcaagccctacggcatgagctttccgatcgtgacgatgcgcgatttcgtcgaggtccagagggaattgcttgatagcctcggcatcgagaggctgcatgcggtgatcggtgcctcaatgggcgccctgcaggcctatgagtgggccgcggcctatcccgagcgggtcgagcgcctcattccggtgatcggcagcggctgggccgacggcgacctgatcggctggctcaacatctggtcggcgccgatcaagctcgaccccaactggaatggcggcgactactatgacggcgagccgccgctgcaggggcttgccgagtcgctgaagatcgtgacgttgcaggccaaccactggaaatggtccaacagcgtgttcggccgcgcctgggccaaggacggtgccgatccggcggcaagcttcgacaatctgttcaggatcgaggcggtgcttgacggggccggccaggcccgcgccaagaccagcgatgccaatcatttcctctacctcgccaaggccaatcagctgttctatgccggccacggcgaaaccctctatgaaggcctgcgggcgatcacggcgccgacgctgatcatccatagcgatgacgacctgctgttcccgcccgccgcgatccgcgaaaccgccgccatgatcagatcgggcggcgcgccggtcgaggtggtcgggctgcacggcgggcgcggtcatctggatggagtcctgtcaatcagccaggccggcgcgcagatcggggcattcctcgcgaggtga

SEQ ID NO: 548 - protein, 397 aa, Unknown
  Obtained from environmental sample
  SIGNAL (1)...(27)
  DOMAIN (68)...(393): alpha/beta hydrolase fold
MNKRSLRKCLSAVGVVAILFSVQQVLAYDEIVQKQAFELASYTTTGGETIKDVRIGWEAYGTLNEAKDNVILITHFYSGNSHAAGRYTAEGPAGYWNAIIGSGKPIDTDKYYVVSSDTLVNLGANDPNVITTGPASINPDTGKPYGMSFPIVTMRDFVEVQRELLDSLGIERLHAVIGASMGALQAYEWAAAYPERVERLIPVIGSGWADGDLIGWLNIWSAPIKLDPNWNGGDYYDGEPPLQGLAESLKIVTLQANHWKWSNSVFGRAWAKDGADPAASFDNLFRIEAVLDGAGQARAKTSDANHFLYLAKANQLFYAGHGETLYEGLRAITAPTLIIHSDDDLLFPPAAIRETAAMIRSGGAPVEVVGLHGGRGHLDGVLSISQAGAQIGAFLAR

SEQ ID NO: 549 - DNA, 954 bp, Unknown
  Obtained from environmental sample
atgttctatcgaatttctctgttgattaccggcctggttctggtgctgtttttctgcctggcgctgtggagccggcttggtattcaggccttgcagcgcgactacccgccgacgggcgactttatcgatgtcgacggctaccgcctgcattatcagttgcgcggcaatgggccgcccatcctgttgatccatggcgccaattccaatctgcgggacttcagttcaagcctgatgccgcggctggcgcaacaatatacggtgctggccatcgaccggccaggctatggttacagtagcaggccacccgacggcgactggctggaccccgccgctcaggcgcggctgctgttactggcggcgcatcagctcggcctggaacgcccgctgctggtcgggcattcctgggcgggcgccgtggtcatgaccgcgctggtgcgcatgccggagcaagtatcaggtggggtactgctggcgggtgccagcgggcactggagcgggtccacgggtgcaatctacaccctggccaaagtgccgtttgtgcgtgagttgtttgcccacaccctggtctatcccgccggaagggtgttcatcgacagggctgttgccaaggtgatggcgccgaatcccgtacccgaaaactatcgccagcgcattgccgccgatctggcgctgcggccgggaaccttccttcacaatgccgcggatatgaatcgactcagcgagttcctgcagggcgaaagccgttactacgacaggatcgaacagcctctgttgatcattcacggcgaggccgacgaactggtaccgttctggaatcacggtcagcgcctgttgtccgtggtcgccgacactgaattgatgctgctgcccgatgtcggccacgcaccccaccacgtgcaagccgatgccattgcccgccggattgccgaattccgggctcgcctggggcggtaa

SEQ ID NO: 550 - protein, 317 aa, Unknown
  Obtained from environmental sample
  DOMAIN (85)...(310): alpha/beta hydrolase fold
MFYRISLLITGLVLVLFFCLALWSRLGIQALQRDYPPTGDFIDVDGYRLHYQLRGNGPPILLIHGANSNLRDFSSSLMPRLAQQYTVLAIDRPGYGYSSRPPDGDWLDPAAQARLLLLAAHQLGLERPLLVGHSWAGAVVMTALVRMPEQVSGGVLLAGASGHWSGSTGAIYTLAKVPFVRELFAHTLVYPAGRVFIDRAVAKVMAPNPVPENYRQRIAADLALRPGTFLHNAADMNRLSEFLQGESRYYDRIEQPLLIIHGEADELVPFWNHGQRLLSVVADTELMLLPDVGHAPHHVQADAIARRIAEFRARLGR

SEQ ID NO: 551 - DNA, 1851 bp, Bacteria
atgggtgtttttcagtacaaagactttgatgacactacttccaaagagttattttccgacgcaaaaattatctccggatatgcttaccataatctgggcagcggatttgctgaggggtattacaattatggttatggtttagggatgccattaacattggtgaccgcacttctcggcagcacgacatcgcagggtatcacacctaaattgccttggaatccggacgcagaaaaacaggcacgagataaactcaatgaatcgggatggtttactatcagtgctgatgagttaggctatcagggtaaaactgatgcccgcggtactttttttggcgaaaaatcaagtcattccactgctcaggcagaggtaatgggaaaatatgatgctgatggtaatttgatttctattggcattgcgtttcgtggtacgagtggtcctcgagagtcagttattaccgatacattcggcgacattatgaataatgtgctggtagctttgggtaagaaagactattcgaatgactacacgccaaacgcttttggtcggctgctggaccatgtggctaattatgccaaagctcacggtttgacaggcaatgacgttgtggtcagcggccatagtttgggtgggttagctgtgaatagtatggcggagtctagcgatacgaaatgggggggattctactctcagtcgaattatatctctttcgcttcgccatcacagtatgaaataggtaacaaggtgctgaatgtaggatatgaaaatgatcccgtattccgtgtattaaacggcaccaccgttgatgcgttctccccaggtgttcacgatgtaccaagggattcggctacaaataatattgttaactttaacgatcactatgcatcaaattggtggaatatattgcccttctctattgctaatctgtcaacctgggtttcgcatgtgacgccgttttatcagagcggcatgcaacgtattatggagtcaacgttctacaatctaactcataaagactctactattgttgtcagcaatctttccaatgtcacccgtgaaaatacttgggtacaagatttgaaccggaatgctgagaaacacacaggtagtacttttgttattggtaccgacggcaacgacctcattaaaggtggtagaggaaacgattatctggaagggcgcgatggcaatgatatcttccgtgatgacgggggatttaacatgattgccggcggaaaaggtcataatacctttgacttacagaagtcactaaaaaatgcagaaatagcctatgacaaggcagggacattgtatgtgcgtgatgcacaaggtggtatcaccgttgctacggatatttcgacgataagaagtaaggaaagtacctggctatttctgactaaacaggtggattctcaagttaaagccgatggtttgtattccagccgtggagtaacgaaatacgctaattcagtaaccggcaacgatgggaatgatacactgacttctaaaacctccggtagctggctgttcggtctggatggtgatgatacgttgatcggcttcggcaacaataatgttttcgtcggtggtgaaggcaacgatgtcatgaaaagtcagggtaataacaatactttcctgttcaacggcgagtttgggcaagatatcatctatggctacaataagaccgataaattggtgttcttgggtaccgaaggcagcagtgataaaagtaattatctggatcatgcttctatggtggacaataatttggtgtttactttcggccaaaactcagtcactttgattggcgtcagcatggacagcttattggtagataatataatactggcgtaa

SEQ ID NO: 552 - protein, 616 aa, Bacteria
  DOMAIN (133)...(266): Lipase (class 3)
MGVFQYKDFDDTTSKELFSDAKIISGYAYHNLGSGFAEGYYNYGYGLGMPLTLVTALLGSTTSQGITPKLPWNPDAEKQARDKLNESGWFTISADELGYQGKTDARGTFFGEKSSHSTAQAEVMGKYDADGNLISIGIAFRGTSGPRESVITDTFGDIMNNVLVALGKKDYSNDYTPNAFGRLLDHVANYAKAHGLTGNDVVVSGHSLGGLAVNSMAESSDTKWGGFYSQSNYISFASPSQYEIGNKVLNVGYENDPVFRVLNGTTVDAFSPGVHDVPRDSATNNIVNFNDHYASNWWNILPFSIANLSTWVSHVTPFYQSGMQRIMESTFYNLTHKDSTIVVSNLSNVTRENTWVQDLNRNAEKHTGSTFVIGTDGNDLIKGGRGNDYLEGRDGNDIFRDDGGFNMIAGGKGHNTFDLQKSLKNAEIAYDKAGTLYVRDAQGGITVATDISTIRSKESTWLFLTKQVDSQVKADGLYSSRGVTKYANSVTGNDGNDTLTSKTSGSWLFGLDGDDTLIGFGNNNVFVGGEGNDVMKSQGNNNTFLFNGEFGQDIIYGYNKTDKLVFLGTEGSSDKSNYLDHASMVDNNLVFTFGQNSVTLIGVSMDSLLVDNIILA

SEQ ID NO: 553 - DNA, 1278 bp, Unknown
  Obtained from environmental sample
atggtatatttattcatcagcgtgtttttgcttttactcgccctatgcgcgcttgtgcgcacgccaaaaatcaatgcggtgagaactctatggtttatcgccggtttgttgccgagcgagctgccttggttttttggtgggctgcaactggtgcttatcgcggttttgctgatactcggcgatctttcgtcgtcaacgcacttgaccgctttgatcctgtcagtaggtaccttgaccttatggtacggcttgcacagaaaaacctatttaagcggcactaaactggagcaggctttgtgtgctggtctcggtaaagattatcaacgaaatgtgtcacccgactcggttatccaggccccgtcagtgatcggcaagaaaagttggttaaaacctttttcttttaagcgcgccggggttgagcgagtcaacgatgtggcttatggctcagacccgcgccagaaaatggacatctatcaaatggcgcctccgaaagaagagagtgttgaagattcccataagcgtccggtgctggtctacgtgcacggcggcggctgggttatgggcagcaaacatcagcaaggccagcccctgttaaactatttggctcaaaatggttggttgtgtgtggatatcaattatcggttgtcgcccaaaaaccgttatccggattcccttgttgatgttaaaacagcgatcgtctggttaaaaaataatattcacaattatggcggcgacccaaattttatcgccctggccggtggttccgccggcgggcatctatgcgcattggcagcgcttacgcccaatgtgccgcagtttcaaccgggctttgaacagtccgatacttcggtccaggcagctgtgccgatctatggcgtttacgattttaccaattccaaaaacacttggtccggtaaaaccttgcgccagtttgtgcagcggttggtgatgcctgctgacaaagaggatgaccccgcgttttggcgcgcggcatcgcccaaatttcaagtgcataataacgcgtcgccgatgatgctaatccacggaaccacagacgccttggtttttgttgaagaggcgcgggatttcgcctttaccctagccgcccatactcacgcaccctgggtctacgccgaactgcccggcgctcagcacggctttgatctttttcattccgtgcgcaccgagtacaccattgaggctatcggaaaatttttacgctattgccatcaagcctcacgcacgcccacaccgaaaggcaggggcgtttttgagtga

SEQ ID NO: 554 - protein, 425 aa, Unknown
  Obtained from environmental sample
MVYLFISVFLLLLALCALVRTPKINAVRTLWFIAGLLPSELPWFFGGLQLVLIAVLLILGDLSSSTHLTALILSVGTLTLWYGLHRKTYLSGTKLEQALCAGLGKDYQRNVSPDSVIQAPSVIGKKSWLKPFSFKRAGVERVNDVAYGSDPRQKMDIYQMAPPKEESVEDSHKRPVLVYVHGGGWVMGSKHQQGQPLLNYLAQNGWLCVDINYRLSPKNRYPDSLVDVKTAIVWLKNNIHNYGGDPNFIALAGGSAGGHLCALAALTPNVPQFQPGFEQSDTSVQAAVPIYGVYDFTNSKNTWSGKTLRQFVQRLVMPADKEDDPAFWRAASPKFQVHNNASPMMLIHGTTDALVFVEEARDFAFTLAAHTHAPWVYAELPGAQHGFDLFHSVRTEYTIEAIGKFLRYCHQASRTPTPKGRGVFE

SEQ ID NO: 555 - DNA, 957 bp, Unknown
  Obtained from environmental sample
atgaggatccgtgcgctgaccacctgcttcgccctgctcgccgcagggctgctcctgtcgccacccgcgatggcggagggtgaccccgagtacagcgtccccctggagctgctgcgcggctcggtggactgcaatgccgagttcgtccatctcgaccgggagccggtcctgctcgtgcacgggacgtccggcacgcccgaggaagcctgggcctggaactacatcgagaacctcccccgccaggggttcgacgtgtgctgggtccgcctccccaaccgggcgctcagcgaccagcaggagtcggcagagtacgtggtgtacgcgctgcgactcatgcacgagcgggcggagggacgcaagatcgacgtgataggccacagccagggtgggctgctgccccgctgggcgctgcgttggtggccgagcctgcgcgacatcgtggacgacttcgtcccgctcgccgcgcccgcccacggcgccagcggcgcagagatgttctgtccgacgagctgcgcgcccgcggtccagcagatgaagcccgactcccgctacctcgccgccctcaactcagtggacgaaacccccggcgacgtggactacacgagcatctacagcatgaccgacgagctcgtgcagccctacaccagccctccgctggaaggcgggaccaacatcgcgatccaggacgtctgtcccggccgggtcgtgcatcactacgggatcgtctacgacgcggtcgcctacgccctggtggtcgatgcgctcgtcaacccgggcccggccgacccggcccggctccccgccgacatctgcctacagacgtggatgccgggtgtgaacgagatcgacgtcgtggccgggaacatgatggcttacgggaacgcctacctggccttcggtgcctacccacccagcgattccgagcccgagccgaagccctacgtggacgaggactga

SEQ ID NO: 556 - protein, 318 aa, Unknown
  Obtained from environmental sample
  SIGNAL (1)...(25)
  DOMAIN (53)...(257): Lipase (class 2)
MRIRALTTCFALLAAGLLLSPPAMAEGDPEYSVPLELLRGSVDCNAEFVHLDREPVLLVHGTSGTPEEAWAWNYIENLPRQGFDVCWVRLPNRALSDQQESAEYVVYALRLMHERAEGRKIDVIGHSQGGLLPRWALRWWPSLRDIVDDFVPLAAPAHGASGAEMFCPTSCAPAVQQMKPDSRYLAALNSVDETPGDVDYTSIYSMTDELVQPYTSPPLEGGTNIAIQDVCPGRVVHHYGIVYDAVAYALVVDALVNPGPADPARLPADICLQTWMPGVNEIDVVAGNMMAYGNAYLAFGAYPPSDSEPEPKPYVDED

SEQ ID NO: 557 - DNA, 1689 bp, Unknown
  Obtained from environmental sample
atgggattgtttgattacaaaaatgccgacggcaaagcgttgtacagcgatgcgatcgcgctgacgctgtattcctacacgccgaccgggcagcctttgcccggtaccggttggtcgccactgggtgcctcggccctgggttatcaaggcaagaccgacgcgaaagggactttcttcggcgagaaggacggcttcaccagcgccgaggcggaagtgctgggcaaatacgacgccgccggcaagctgatcggcatcggcgtggcctttcgcggcactggcgggctgagctacagcgacaccttcggcgacatgaaaaacaatctgctggccgccatcgggccggtggattacgccaagaattacgcgaaaaacgccttcgacaacctgctcaaatccgtcgccgcgtttgccacggctcacggcattgccgccaaggacgtgctgattagcggccacagcctcggcgggcttggggtcaacagcgtggcggagctgagcgcgagcgactggggtggtttcttcaaggacgccaactatatttcgttcgcctctccgacccagagcagcaccggtaccaacgtgctgaacattggctacgagaacgatccggtattccgtgtgctcgacggcaccacgttcagcacggcgtcgatgggcaaacacgacaagccgcacgactcgaccaccgacaacatcgtcaacttcaacgacaactacgcgtccaccgcgcagaacctggtgccgttcagcatcgtcaacccgctgaactggtcggcccacagttcgctgggctatgccgatggtctgaaccgggtgatcgactcgaagttctacaacctcaccagccaggactcgaccatcatcgtgtccaatctggaggcctcgtcccggggcaagacctgggtcgaggatctgggccgcagcggcgagccgcacaccggcagcaccttcatcatcggcaccgacagcaacgactggctcaagggcggggcgggcaacgacttcctcgaaggccgtgccggcgatgacctgttccgcgatgacgggggcttcaacattttgttgggtggtcagggccacaacaccttcgacctgcaaaaaccgttgcagaacttcagcttcgccaacgacggcgacggcacgctctacgtgcgcgacgcctacggcggcatcagcatgacccgtgatatcggcgcgatcgtgagcaaagagtccggttcgatgtggagcagcaaggaaatcacctggaccgtcaccggcaaaggcctggccaacggcgccgaactgacccagtacaaccattcgctcaacggcggcgcactcggcgacacgctgaaagccaccgctgacggcgactggctgttcggcctgggcggcgacgatcacctgttcagcgacaaggcccacgtaaccttcgtcggcggcgccggcaatgacgtgatgagtgcggtgggtggcaataacaccttcctgttcagcggcgcgttcggcttcgactcgatccatggctaccagggcagcgacaaactggtgttcatgggcgtgcagggcgcggggcagggctacgactacaagcaacatgcttcgcagtccggcgccgataccgtgctgaagattggcgactatgccgtgaccctgatcggggtgggtgtggctaacctgtcggactcgagtttcgtgttcgcctga

SEQ ID NO: 558 - protein, 562 aa, Unknown
  Obtained from environmental sample
  DOMAIN (82)...(212): Lipase (class 3)
  DOMAIN (328)...(345): Hemolysin-type calcium-binding repeat (2 copies)
MGLFDYKNADGKALYSDAIALTLYSYTPTGQPLPGTGWSPLGASALGYQGKTDAKGTFFGEKDGFTSAEAEVLGKYDAAGKLIGIGVAFRGTGGLSYSDTFGDMKNNLLAAIGPVDYAKNYAKNAFDNLLKSVAAFATAHGIAAKDVLISGHSLGGLGVNSVAELSASDWGGFFKDANYISFASPTQSSTGTNVLNIGYENDPVFRVLDGTTFSTASMGKHDKPHDSTTDNIVNFNDNYASTAQNLVPFSIVNPLNWSAHSSLGYADGLNRVIDSKFYNLTSQDSTIIVSNLEASSRGKTWVEDLGRSGEPHTGSTFIIGTDSNDWLKGGAGNDFLEGRAGDDLFRDDGGFNILLGGQGHNTFDLQKPLQNFSFANDGDGTLYVRDAYGGISMTRDIGAIVSKESGSMWSSKEITWTVTGKGLANGAELTQYNHSLNGGALGDTLKATADGDWLFGLGGDDHLFSDKAHVTFVGGAGNDVMSAVGGNNTFLFSGAFGFDSIHGYQGSDKLVFMGVQGAGQGYDYKQHASQSGADTVLKIGDYAVTLIGVGVANLSDSSFVFA

SEQ ID NO: 559 - DNA, 870 bp, Unknown
  Obtained from environmental sample
atgtcaaagaaactcgtaatatcggtagcgggcggcggagcactcggaatcggaccactcgcattcctgtgcaagattgaacagatgctgggaaagaagataccccaggttgcgcaggcatacgccggcacttcaaccggagcaataattgcggcaggactggccgaaggctactccgcgcatgaactgttcgacctatacaaatcaaatctcagcaagatattcaccaaatacagctggtacaaacgcctgcagccaacgtgtcctacatatgacaacagtaacctaaagaaattactgaaggacaaattcaagggcaaggtcggcgactggaaaactcccgtatacatcccggcaacacacatgaacggccaatccgtagaaaaggtgtgggacttgggtgacaagaatgttgacaagtggtttgccattctgacaagtaccgcggcaccaacctatttcgactgcatatacgacgacgagaagaactgctacatcgatggtggcatgtggtgcaacgcaccaatcgatgtgcttaatgcaggcctgatcaagtccggctggtccaactacaaggtcctggacctggagaccggcatggacacaccgaatacggaaagcggaaacaagacacttctcggatggggggaatacatcataagcaactgggtagcccgttccagcaagtccggcgaatacgaggtaaaggccataatcggggaagacaatgtatgtgttgcccgtccatacgtaagcaagaaaccgaagatggatgacgtggacagcaagacgctggatgaagtcgtggatatctgggaaaactacttctacgccaagcagaaagacatcgcatcgtggctgaaaatctag

SEQ ID NO: 560 - protein, 289 aa, Unknown
  Obtained from environmental sample
  DOMAIN (7)...(180): Patatin-like phospholipase
MSKKLVISVAGGGALGIGPLAFLCKIEQMLGKKIPQVAQAYAGTSTGAIIAAGLAEGYSAHELFDLYKSNLSKIFTKYSWYKRLQPTCPTYDNSNLKKLLKDKFKGKVGDWKTPVYIPATHMNGQSVEKVWDLGDKNVDKWFAILTSTAAPTYFDCIYDDEKNCYIDGGMWCNAPIDVLNAGLIKSGWSNYKVLDLETGMDTPNTESGNKTLLGWGEYIISNWVARSSKSGEYEVKAIIGEDNVCVARPYVSKKPKMDDVDSKTLDEVVDIWENYFYAKQKDIASWLKI

SEQ ID NO: 561 - DNA, 468 bp, Unknown
  Obtained from environmental sample
atgaagaaactactgctcaccgtctgcctcgcggccttcgcgtcaatcggggcgagagccgaacttgcgagcgtcagcctcgaagccggcgacaacgccgttccggcaccctgccgagccgtgatggtacacgccatttcgacgaacgcgtccggaaccgtcacgctgaagaaggtcagctcgttttccctcgcgtggatcgactggcagaccgtcaccaacatcacctacggaacggcgtggtcgaacttgacgcacaccgtcacgaacgacgttgtgacggcatggcgcacaaacacggtcgatggagcgaccgtcacaaacttcgtcgcccgcgcggtaaacgagatgccgtccgtctttccgtggcccgaccttctgatcctcacgaacaaggttgcgtcgagcgtcgtctatacgaacatcccgtacaggatcgaggcgtcgcggcgcgtcgagacggtgggg

SEQ ID NO: 562 - protein, 156 aa, Unknown
  Obtained from environmental sample
MKKLLLTVCLAAFASIGARAELASVSLEAGDNAVPAPCRAVMVHAISTNASGTVTLKKVSSFSLAWIDWQTVTNITYGTAWSNLTHTVTNDVVTAWRTNTVDGATVTNFVARAVNEMPSVFPWPDLLILTNKVASSVVYTNIPYRIEASRRVETVG

SEQ ID NO: 563 - DNA, 1854 bp, Unknown; identical to SEQ ID NO: 87
  Obtained from environmental sample

SEQ ID NO: 564 - protein, 617 aa, Unknown; identical to SEQ ID NO: 88
  Obtained from environmental sample
  DOMAIN (133)...(265): Lipase (class 3)
  DOMAIN (381)...(398): Hemolysin-type calcium-binding repeat (2 copies)

SEQ ID NO: 565 - DNA, 969 bp, Unknown
  Obtained from environmental sample
atgagctggatgcaatcggccgctagcatccttgccctggcgctggccctactggccggcggggtgtggctcgtggactggcgcgccgaccggcgcgaggcggaagcgctcgcgcagtggccgccggagggcatttttgtccaggttgaggaccgccgagtccacgccgtcacgcgggggcaaggccccgacctcgtcctgatccacggcgcctcgggcaatgcgcgggatatgaccttccgctttatgggcctgctaacggaccgctaccgtgtcaccgcgttcgaccgtccgggcctgggctacaccgaccccgcgccggccgattggggcgagagcccgaaggagcaggccgccttcctacaggccgcagcgcgggagctgcatatcgagagccccatcgtcctgggccactccttcggcggggctgtggcgctggcctggggattgagcgacccggaggggaccgccgccgtcgtggacgtttccggtgtggcgatgccctggcccggccgcctgggctggctctaccgcatcaatggcccgtggctcggtacggcccttgtgccgcctctcgttgctgcctttgcgccccaaccgctcctagaccgggcgctcgcggcgacgttcgcgcccgatcccgtccccgaaggctatgccgagcacttcggagccagcctctcgatccgacgcgcctcgtttcggaccaacgcccgtcaggtgaacgcgctgcgggcctcggtcatggagatgtcccgggactattcaaccttctccgtgccccttgaaatcgtccacggcgaagccgacaccattgtccccctcgaggtccattcctgccctctgtcgcgaatcattcctggcgcgaaccttacggtgctgcccggcgtcggccatatgccgcaccagacgcaccccgaggcggtggtcgccgctgtcgatcgggcgcgagcccgcgctgggctctga

SEQ ID NO: 566 - protein, 322 aa, Unknown
  Obtained from environmental sample
  SIGNAL (1)...(24)
  DOMAIN (90)...(315): alpha/beta hydrolase fold
MSWMQSAASILALALALLAGGVWLVDWRADRREAEALAQWPPEGIFVQVEDRRVHAVTRGQGPDLVLIHGASGNARDMTFRFMGLLTDRYRVTAFDRPGLGYTDPAPADWGESPKEQAAFLQAAARELHIESPIVLGHSFGGAVALAWGLSDPEGTAAVVDVSGVAMPWPGRLGWLYRINGPWLGTALVPPLVAAFAPQPLLDRALAATFAPDPVPEGYAEHFGASLSIRRASFRTNARQVNALRASVMEMSRDYSTFSVPLEIVHGEADTIVPLEVHSCPLSRIIPGANLTVLPGVGHMPHQTHPEAVVAAVDRARARAGL

SEQ ID NO: 567 - DNA, 951 bp, Unknown
  Obtained from environmental sample
atgcgtcgcatcttgatcgtgattgccatcgtcgtcgccggcttgctcgccggcctgaccgcctttgattacctcgcgcccgagaaagctgccgaaatcggcgtcggcctggagcgcgcacgcaacgggctggccgaaaagcagatcaccgtgaacgggctgaccatcgcctatctggatggcggcccggccaccggcgagccactggtcctgattcacggtttcggcgcggacaaggacaacttcacgcgcgtatcgggttacctgacgccgcagtaccgcgtgatcattcccgatctgccgggcttcggcgagagcagcaggcccgcggctgccgactacaccgtcggcgctcaggccgatcgcgtgcaagccttcgcgcaggcgctcggcatcacgcgtgcgcatttcggcggcagctccatgggtggtgcgatcatcaccgcccacgcactgaagtaccccgacgcaaccgccagcctgtggctgctcggaccgggcgggctgtccaaggccttcgactccgagctgggcaagactatccaggaaaccggcaagaacccgctgctggcgcagacaccggaggagttcccggcgatcatgcagttcgtgatgtccaagccgccgttcttcccctactcggttaaacacgtgctgggtaaacgggcggccgcggattatccattgcacggccgcatcttcgtccagatcaacgatccgcagcaggcctacccaagcttcgacggcctgatcaaggacatccaggcgccggccctggtcgtctggggcaacgaggaccgcgcgctcaaccacgaggcggcgcggatttacaaagccgagatgccgagggccgagatcatcatcatggatggcatcggccacctgcccatgatcgaggccgccaggcagtcggccaaggactatctggccttccgcggccgtatccagtaa

SEQ ID NO: 568 - protein, 316 aa, Unknown
  Obtained from environmental sample
  DOMAIN (93)...(310): alpha/beta hydrolase fold
MRRILIVIAIVVAGLLAGLTAFDYLAPEKAAEIGVGLERARNGLAEKQITVNGLTIAYLDGGPATGEPLVLIHGFGADKDNFTRVSGYLTPQYRVIIPDLPGFGESSRPAAADYTVGAQADRVQAFAQALGITRAHFGGSSMGGAIITAHALKYPDATASLWLLGPGGLSKAFDSELGKTIQETGKNPLLAQTPEEFPAIMQFVMSKPPFFPYSVKHVLGKRAAADYPLHGRIFVQINDPQQAYPSFDGLIKDIQAPALVVWGNEDRALNHEAARIYKAEMPRAEIIIMDGIGHLPMIEAARQSAKDYLAFRGRIQ

SEQ ID NO: 569 - DNA, 972 bp, Unknown
  Obtained from environmental sample
atgcaccaccgccatctcagcccactgatgcgcatccgagcgctacaggccaccttctacctggccttcctgctcgcgctgccgagcggccccgccgcggcgcagagccgcggcccgctcgagctggcgaccgcgccggtccccgccgccgcgctccgcatcgcctacgggagtgatccgctgcagttcggggagctgcgcctgccggcgacggcggggccgcatccggtggcgatcgtggtgcacggcggctgctgggtcgcgaagctggggcagctggacgagcgcgccgtcgccctggacaacatgcgcccgctggccgcggcgctgacggaggcgggcatcgccacctggaacatcgagtaccgccgcctcggccatgagggcggcggctggccgggcaccttcctcgacgtcgcaaacgcggccgatcatctgcgcaccctcgcgcgtgagcatcctctcgacctggcgcgcgtcatcgccatcggacactcggcaggtgggcacctcgccatctggctggcggcgcgcggcagggtgccggcgaccagcgagctgcatgcggcggatccgctgccgctgatcggggccgtgaacctcgatgggcccgcggacctgcagagcatggtgccgctgcaggagcgcatctgcggccggccggtcatcaccgagctgatggacggcacgcccgccgagcggccggagcgctaccgcgccacctcgcccatcgacctgctgcccctgggagttcgccagaaggtacacgcgggccgcatgttcgcggagcaggccgaggcgtaccaggccctcgcgcagcaggcgggcgatccgatcgcagcgaccatcatcgccgatgccggccatttcgtgttcatcgatccgcagtcggctgcctggccgcgagtgctccggagcattcgccgcttgctgctgatcccggactccgcgtcgccggaggaggagtcatga

SEQ ID NO: 570 - protein, 323 aa, Unknown
  Obtained from environmental sample
  SIGNAL (1)...(34)
MHHRHLSPLMRIRALQATFYLAFLLALPSGPAAAQSRGPLELATAPVPAAALRIAYGSDPLQFGELRLPATAGPHPVAIVVHGGCWVAKLGQLDERAVALDNMRPLAAALTEAGIATWNIEYRRLGHEGGGWPGTFLDVANAADHLRTLAREHPLDLARVIAIGHSAGGHLAIWLAARGRVPATSELHAADPLPLIGAVNLDGPADLQSMVPLQERICGRPVITELMDGTPAERPERYRATSPIDLLPLGVRQKVHAGRMFAEQAEAYQALAQQAGDPIAATIIADAGHFVFIDPQSAAWPRVLRSIRRLLLIPDSASPEEES

SEQ ID NO: 571 - DNA, 1059 bp, Unknown
  Obtained from environmental sample
atgtccgattcccggggcgcgaccgtgattccgggccacgggacggtgtacttcggtccctatcgtgcctcgagcggttggggcacgctcgaagcggagaagggcgtgctgatcgcgagtgacggcggttcgcgccgtgtgtcggcgcccgtgcggcgcgatgacggtacgtttgctggggacggatggacggtcagggtgggaccgggctgggtcgtgcgtgaaggagcacggcggggtgactacgaagtcgtccggcttgacgagcccgcgcgtccgctctcggtcacgacggacgtggtgtacgggcacaaggatggtctggcgctcacgttcgacgtgcatcgcccagcgcagcccaatggcgccgccgtcatcgcgatcgtgagcggcgggtggcaatcgagcgtggagttgagccgtcttatcgtggacggccatctctccccgttgttgaacgagaagggattcaccgtattcgccgtgagacacggcagcagcccgcggtatcccatgtccgcgatcgtggcggacgtgcggcgggccgtccgtttcatccgtcagcacgcgggcgagtacggcgtggaccccaaccgcattggcgtttatggcggcagcgccggcgggcagctcgcgttgctgctcggcacgacagccgactccggggatccgtcggcctctgacgcggtgctcagggaatccagtcgcgtcgcggcggttgtggcgtactttccgcccacggatctctctcgatttgcgaacaagcggtcgttcccggccacggcggcgttgacggaggccgaagcggcggagtactcacccattcgcttcgtctcgcccggggctgctccctcagtcatcgtgcacggcgacgccgacacagtcgtcccgatggtcgagggggagacgatgcacgaggcgctgacgaaggcgggcgtgatcgcgtcgttcattcgcgttgaacgcgctgggcacgcgttcgagggcgccgatctcgagcgggtcaacgccgcaatggtgcagtggttcgagcggcatctcgggagcgcggcgaggtag

SEQ ID NO: 572 - protein, 352 aa, Unknown
  Obtained from environmental sample
MSDSRGATVIPGHGTVYFGPYRASSGWGTLEAEKGVLIASDGGSRRVSAPVRRDDGTFAGDGWTVRVGPGWVVREGARRGDYEVVRLDEPARPLSVTTDVVYGHKDGLALTFDVHRPAQPNGAAVIAIVSGGWQSSVELSRLIVDGHLSPLLNEKGFTVFAVRHGSSPRYPMSAIVADVRRAVRFIRQHAGEYGVDPNRIGVYGGSAGGQLALLLGTTADSGDPSASDAVLRESSRVAAVVAYFPPTDLSRFANKRSFPATAALTEAEAAEYSPIRFVSPGAAPSVIVHGDADTVVPMVEGETMHEALTKAGVIASFIRVERAGHAFEGADLERVNAAMVQWFERHLGSAAR

SEQ ID NO: 573 - DNA, 1887 bp, Unknown
  Obtained from environmental sample
gtggctctacggagcgtgaccgccgtggccatgagcccggacggacagtgggtagcctacacggccaccaggccacgcgacgaggtcgagacccgagcgccggcgttctccgagctgtgggtggtgccggccgccggcggtgagccgcggctgatcgtcggccagccgcacaccgtggccagcccggggtggaccccggacggccgcatgatcaccttcgccgccacgctgccggccgccgagggccgccaggtgtacggcgtggacccggcgggcggcgagccccggccgctgaccgcctcgccgcggggcgtggcggccttcgccctgtcgcccgacggcgggaggatcgcctacaccgagagcgtgccgcagcccgagcacatcgccgagcggcgggcggccggcaacgacgtgatcgtggccagcgagcagggcacgttcatgcgcctcttcgtccagcccatgggcggccaggccaatcccatcaccccggtggaccgggtggtccgcgacttcacctgggctccgggcggggcctggctggcggtccagtggacggaagggaccgacgcggacgcggacctcatgtaccgcgagatgcatggcgtggcggcggacggggcgtggacgcgcccgctggtcgagacggaaggcaagctggggcccatgcggttctcgccgcgcggcgacttcttcgcctggctgggcgccacggagttcaatgacccactggcgcagagtgtgttcgtggttcccatgcgtgacgggcaggccacggccgcgccgcggaacctgacgcccgggcttgaggccagcgccgaggcgctggactggctcgatgaccggacgctctggttcgtggcctcggagagcacccgcacccgcatgtaccgcgtccgccaggacgggacccggctcgagcgggtcatgggcggcggcgccgagatcttccggagcgccagcttcgacgcccggaaccggacgttccccacggccgccaataccgcgcggcacccgaacgaggtgttcgccgccacactgggccgcgacctgcgccggctcacccaccacaacgcctggctggcgaacgtggcgctgggcgagcaggagaccgtggcctgggagggacctgaaggttggatgatcgagggcgtggtggtgcgtccagtcggcttcgtggaaggccagcgctacccgctggcgatcctgccccacggcggccccgagggcgtggacctggacggctggaacaccaaccccctctatccggcgcaggtcctggccggagagggatacgtggtcttcttccccaactaccggggcagtggcggccgcggcgtggtctggagcaagggcgatcaccgcgacctgggcggccgcgagatggaggacatcctgaccgggatcgactacctggccgagcggggctggatcgatccggatcgcgtcgggatcagcgggaccagctacggcggctacctgtcggcctgggccgccacccggcacagcgaccggttccgggcggccatcccgttcgcggggctcacgaactggatcagcttcacggggaccaccgacatccccatcgagatgatgttcgtccactgggacctggacatcttcggcaacttcggcctctacatggaccggtcaccagtctcgcacctggtgggcgcagccacgccgaccctgatcggcaccgggctggccgacgaccgggtccacccggagcagtccatccagctatacgggctgatgcgcctggcgggcatcccggtggagttgttgttgtacccgcgggagccacacgggctgcgtgagcgggctcaccagttggactacatgtatcgggtggtggattggtttgggaggtatttgaggtag

SEQ ID NO: 574 - protein, 628 aa, Unknown
  Obtained from environmental sample
  DOMAIN (416)...(495): Prolyl oligopeptidase family
MALRSVTAVAMSPDGQWVAYTATRPRDEVETRAPAFSELWVVPAAGGEPRLIVGQPHTVASPGWTPDGRMITFAATLPAAEGRQVYGVDPAGGEPRPLTASPRGVAAFALSPDGGRIAYTESVPQPEHIAERRAAGNDVIVASEQGTFMRLFVQPMGGQANPITPVDRVVRDFTWAPGGAWLAVQWTEGTDADADLMYREMHGVAADGAWTRPLVETEGKLGPMRFSPRGDFFAWLGATEFNDPLAQSVFVVPMRDGQATAAPRNLTPGLEASAEALDWLDDRTLWFVASESTRTRMYRVRQDGTRLERVMGGGAEIFRSASFDARNRTFPTAANTARHPNEVFAATLGRDLRRLTHHNAWLANVALGEQETVAWEGPEGWMIEGVVVRPVGFVEGQRYPLAILPHGGPEGVDLDGWNTNPLYPAQVLAGEGYVVFFPNYRGSGGRGVVWSKGDHRDLGGREMEDILTGIDYLAERGWIDPDRVGISGTSYGGYLSAWAATRHSDRFRAAIPFAGLTNWISFTGTTDIPIEMMFVHWDLDIFGNFGLYMDRSPVSHLVGAATPTLIGTGLADDRVHPEQSIQLYGLMRLAGIPVELLLYPREPHGLRERAHQLDYMYRVVDWFGRYLR

SEQ ID NO: 575 - DNA, 1293 bp, Unknown
  Obtained from environmental sample
atgaaacgattgctttgttccttattactggcactctcgcttgttacctacgcccagccgcatatgggcttagcagaagtacccttgcagcctaatgtatcacttcctggcgtatcggcgcaaaggctggctcgcatcgatgggctgctgcaggagtatgtaagcaaaggctggctgcccggcgccgtggccctggtggcaaaagacggcaagatcatttaccataaagcttttggctacagcagcctcgaaacccctacctcgcttcagaaagatgccatcttccgcattgcctcgcaaacaaaagccatcacctcggtaggcatcatgatgctgtgggaagaaggcaagctcgggctcgatgaaccagtttcccgctacattcccgagtttaagaatcctaaagtgctccttgctttcaacgcatccgattcttcttatacaacggttccggccaaaggcgaggtaaccatccgccagttgcttacccatacttccggtattggttatgcacaaattggctcgccggagatgaatgcactgtatgcaaaagccggcgtggtgggcggcattggggtaggcgccattaccctggccgataaaataaaaatattgggcggcctgccgctttttcatcagcccggcgaaaagtggacctatggccttagtaccgatgtgctgggttatgtaatagaagtggtaagcggccgcaacctggaccagttttttgccgagcgcatctttaagccgctgggcatgcaggatacttacttttaccttcccgaaagcaaaagaagccggcttgtaaaattgtattcggaagataagagcaagaaacttgttaaggccagttccgagatgagtcttaatggagcattcaatcccgattacccggcatcggcaggcacctatttttcgggcggcggcggcctgtcggctacggctttggattatgccatttttatgcagatgctgctcaacggcggcacgtacaacggggtacggcttttggccccggccacggtacggctgatgaccaccaaccaggttggcgataaaaccatcgggcggggcaataaatttgggcttggctttgagctggtaaccgaagaaagcaagtgggctacgccgctttcggcaggcagtttttcgtggggtggcatgttttcttcttcgtactggattgatccaaaagaaaaaattgtggcccaactgtttttaaacctttaccccaacagccatggcgaagtgcacgataagtttaagacaatggtgtatgcagcgctggagtga

SEQ ID NO: 576 - protein, 430 aa, Unknown
  Obtained from environmental sample
  SIGNAL (1)...(18)
  DOMAIN (46)...(428): Beta-lactamase
MKRLLCSLLLALSLVTYAQPHMGLAEVPLQPNVSLPGVSAQRLARIDGLLQEYVSKGWLPGAVALVAKDGKIIYHKAFGYSSLETPTSLQKDAIFRIASQTKAITSVGIMMLWEEGKLGLDEPVSRYIPEFKNPKVLLAFNASDSSYTTVPAKGEVTIRQLLTHTSGIGYAQIGSPEMNALYAKAGVVGGIGVGAITLADKIKILGGLPLFHQPGEKWTYGLSTDVLGYVIEVVSGRNLDQFFAERIFKPLGMQDTYFYLPESKRSRLVKLYSEDKSKKLVKASSEMSLNGAFNPDYPASAGTYFSGGGGLSATALDYAIFMQMLLNGGTYNGVRLLAPATVRLMTTNQVGDKTIGRGNKFGLGFELVTEESKWATPLSAGSFSWGGMFSSSYWIDPKEKIVAQLFLNLYPNSHGEVHDKFKTMVYAALE

SEQ ID NO: 577 - DNA, 1860 bp, Unknown
  Obtained from environmental sample
atggcgatatttgattataaaggacaggacgcacgtacactcatctcggatgcctggaccctggctacctacaccagtgggaccgccaccgtgggggccctgtacaacatacccggggcgatccttggagagggcaacagcttttccctgcccaaaggttggcgtgagattaatgccagtgagctggatgtcgataacagccgtctggacattacggggagtttcacgggtgggggtgttttcggtgcccaggccagggtgttcgggcaatacgacagtagtggccagttgactaaaatggcgttctccatagccggcactaactcaccgatcgatctgattggttggccagcgatgatcgataactcctatatcaacggttttgattacctgctcgatgccatcaaggattacgccgttgcaaagaacttgagtggtaaggacgtgctggttaccggttacagccagggaggtgcggtgaccaacggtatgttcctgaccaaggacacgctggcagacggtttcttcaaagactcggattactttggcatggagtcgcccaaagtcggcaacgacagcggcatcttcaacttcggctttgaaaacgacgtggtgcatcgacttatcggcgaagaaaccaacctgggcagcgccgccatcgatgccctgaccggcagtgatatcaactacacctcgaccaccgacaacatcgtgctgtttgacacgatctatgcactgcctacctggcccaacggccctttctccattgccaacctgacaggctgggctgcccacctcgaaggcattttcatcaaccccatccagaccatcagccagtcgacgttctacgatcatatcgagcaggacagcaccatcatcatcagcaatctcgaccccatcagccgcagcttcacctgggtcagcgataaagccaccgcgacctccaaccactacggcacgccggcgttcctgctagggactgccagcggcgataagctacaggatggtcgcagcgatgacttcctcgatggatttgccggcgacgacagcttcagggtcagcactggaaccgatatcgttgccggcggcgcgggcagcgataaggtgtttctcaaaggtgccgtggcgaactacgaagcggtcaagctgagcgacggcacgttgtttctcaacgacacgaccggccaatacgggctcaaggaactgcacagcgttgagttcgttgagtttgaaacggccttggccactgcaaccagccaattgccctttgtcggcggctttctcagcagcgtcggtcaagtgttgaccccggcctatgccgtgaccagcgacaagctggattatcaaggctggttcggctcagacaagtcgtacaacaaagccattgaaggcacggcgcaggccgacagcctcatcggtaccagcggccgtgacctgatgtttggccaggccggtaacgacacactgagcggtggcgccggcaatgacctgctccacggtggcgagggcaatgacacattgctgggcggcactggcaatgaccagctctacggcggcgccggcaacgatatcctggtgggcggccagggcaatgacctgctcagtggtggcgttggcagtgacgtgtttgtattcgaccaggcaggctttggccaggatcggatcagcgacttcaacattcaccagaacgggctggatgtactggtgttttccaagtcgctctttgcctctgtcgatgccgtgctcagtgctgccagccagcaagacaatgacacggtgatccagacgatagacggtagcgtcactctggtgggcttcagcccggcgaatctgaccgcggatatgctcagcctggcttaa

SEQ ID NO: 578 - protein, 619 aa, Unknown
  Obtained from environmental sample
  DOMAIN (490)...(507): Hemolysin-type calcium-binding repeat (2 copies)
  DOMAIN (508)...(525): Hemolysin-type calcium-binding repeat (2 copies)
MAIFDYKGQDARTLISDAWTLATYTSGTATVGALYNIPGAILGEGNSFSLPKGWREINASELDVDNSRLDITGSFTGGGVFGAQARVFGQYDSSGQLTKMAFSIAGTNSPIDLIGWPAMIDNSYINGFDYLLDAIKDYAVAKNLSGKDVLVTGYSQGGAVTNGMFLTKDTLADGFFKDSDYFGMESPKVGNDSGIFNFGFENDVVHRLIGEETNLGSAAIDALTGSDINYTSTTDNIVLFDTIYALPTWPNGPFSIANLTGWAAHLEGIFINPIQTISQSTFYDHIEQDSTIIISNLDPISRSFTWVSDKATATSNHYGTPAFLLGTASGDKLQDGRSDDFLDGFAGDDSFRVSTGTDIVAGGAGSDKVFLKGAVANYEAVKLSDGTLFLNDTTGQYGLKELHSVEFVEFETALATATSQLPFVGGFLSSVGQVLTPAYAVTSDKLDYQGWFGSDKSYNKAIEGTAQADSLIGTSGRDLMFGQAGNDTLSGGAGNDLLHGGEGNDTLLGGTGNDQLYGGAGNDILVGGQGNDLLSGGVGSDVFVFDQAGFGQDRISDFNIHQNGLDVLVFSKSLFASVDAVLSAASQQDNDTVIQTIDGSVTLVGFSPANLTADMLSLA

SEQ ID NO: 579 - DNA, 1524 bp, Unknown
  Obtained from environmental sample
atgaccgtgaaattgttgatcggccccctgctgggcctggaatccgacacgctgtacacggtgtgcttcagcacgtcgcgcgctgccacccgcgccgcagtcacgttcaacggcaacagcgtgaatgcgcttaaagtcggtgacacctacagcaccagcgtatggcgggcggaatggacagcggcgccgcagatcgatccgcgtctggtgcgctacagcgttcacgtggacggcaatctggcccacaatcacgatggcagtgaatggacattctacgtgcccggcagcaaggaaaagccgcgcctgctgtatgcgtcgtgcaacggattttccagcccggatctgatgaccaaaaccgagcgcccgtacatcctgtggggcaagatccgcaaattccagcaagcggaaatggccaaggtgaacacggatgacattcccgcgccctactccctgatgctgctgggcggcgaccagctttacgccgatgaactgtggacgcgggtgccgctgctgcacaagtggagtcacgagcgccacgacaaaaaactcaagacaaaatccagcaaggcactggaagaacagctcgaacgtttttacgacgagctgtaccagtcacgctggaacaaacccgatatgtcgctgatgctggcgtcgatccccaacctgatgatgtgggacgatcacgacatcttcgacggctggggcagcttcccccacgagctgcaggaatgcgaggtgttcaaggcgattttccgggtggcgcgccgctatttcgaactactgcagatccgctcccgtcacaatcgtgcgctgctggatcgcgatgccaatcactacgcctttgccgtgccgtttcgcggctatcagattctggcactggacaaccgcgccgagcgcacccgcaaacaggtgatgagtccgcgccagtggaacagtctgctcgactatctggatcacaaggccacccacggcgatctgctgctgatgtcggcggtgccggtggtgtaccgggatttctcgttcaccgaaaccgtgttcgacaccacaccctgggaagaagaactcaccgacgacctgaaggatcactggcgcgccaaggatcaccagggtgaacgggcgcggctgatcatgcgactgctgaagaacgtcgaactgcgcggcaaaaacaacaacggccattgccgcaccgtgatcctgtccggcgacgtgcacatcggctgcctgggcgtaatccaggatcgccgcgacggcagcaaccgccgcatccatcaggtggtgtcctctggcatcgtgcatccggcgcccagcaagatccagtggtacggcatcatggcagtcaccaacgacgacaccgaatacctgaacgaggacaagagcatcgagatcagaatgatcaagcctcacagctcggaaaaatacctgcgcgtgcgcaactatgtcagcctgctggaaggcagcgacaaaaagctgtggctgaactgggtatgcgattccgacgagaagccggtgtatccgctggactga

SEQ ID NO: 580 - protein, 507 aa, Unknown
  Obtained from environmental sample
MTVKLLIGPLLGLESDTLYTVCFSTSRAATRAAVTFNGNSVNALKVGDTYSTSVWRAEWTAAPQIDPRLVRYSVHVDGNLAHNHDGSEWTFYVPGSKEKPRLLYASCNGFSSPDLMTKTERPYILWGKIRKFQQAEMAKVNTDDIPAPYSLMLLGGDQLYADELWTRVPLLHKWSHERHDKKLKTKSSKALEEQLERFYDELYQSRWNKPDMSLMLASIPNLMMWDDHDIFDGWGSFPHELQECEVFKAIFRVARRYFELLQIRSRHNRALLDRDANHYAFAVPFRGYQILALDNRAERTRKQVMSPRQWNSLLDYLDHKATHGDLLLMSAVPVVYRDFSFTETVFDTTPWEEELTDDLKDHWRAKDHQGERARLIMRLLKNVELRGKNNNGHCRTVILSGDVHIGCLGVIQDRRDGSNRRIHQVVSSGIVHPAPSKIQWYGIMAVTNDDTEYLNEDKSIEIRMIKPHSSEKYLRVRNYVSLLEGSDKKLWLNWVCDSDEKPVYPLD

SEQ ID NO: 581 - DNA, 984 bp, Unknown
  Obtained from environmental sample
atgaaaatcaaaagagtcagcttggcgttcatagtaacgatggctatgctaatctcggcagccggaatcgcttatgccgctaaccaagcggccaaactgattgacgttcctatcaagaaaccgtcggtggagcttatatccggcgtggtgttcgctcagccggccatattcggtgatcctaacttccccttgcacatggacattctgaaaccggataacaaggagcctgttccggctgtgctgttcgttccgggaggcggctttatgtccgccaataaagacagcagcctccagcaaagattcgcgatcgcagagtccggttatctggttgccagtatggaataccgggtcaccccgcagagcactttcccttctccccttgaagacgttaagtcagcggtccgttatttgcgagcgaatgcacaaaagtacaatatcgatccggatcggatcgcggtgatgggcaattccgcaggaggttatctggcggccttcgcgggaaccactaacggtgttgccgagtttgacaaaggagataatctgactcagagcagtaaggtgcaggcagtcatcgacctttacggcctgtctgatctgacgaagattgcggacggattcgccgaagaagtggtagccattcacgattctccgtcggcaccggaaggaatgtgggttcatggaccggcagtgttcgggccaggaggctcgattcactccgatccggccaaagccgccaaggctaacccgatcacctacgtaacgaaagatgctcctccattcctcatcatgcacggcgacaacgacacgctggtttcgcctaagcaaacgcaaattctgcacgaaacgctgatcggcaagggagtcgactccacctattacgtcatcaaaggcgcagggcatggggggccgcactggaaccagacccaggttaccgatatcctggtcgattttttgaacaaaacgtttaagccggccaagaaataa

SEQ ID NO: 582 - protein, 327 aa, Unknown
  Obtained from environmental sample
  SIGNAL (1)...(26)
MKIKRVSLAFIVTMAMLISAAGIAYAANQAAKLIDVPIKKPSVELISGVVFAQPAIFGDPNFPLHMDILKPDNKEPVPAVLFVPGGGFMSANKDSSLQQRFAIAESGYLVASMEYRVTPQSTFPSPLEDVKSAVRYLRANAQKYNIDPDRIAVMGNSAGGYLAAFAGTTNGVAEFDKGDNLTQSSKVQAVIDLYGLSDLTKIADGFAEEVVAIHDSPSAPEGMWVHGPAVFGPGGSIHSDPAKAAKANPITYVTKDAPPFLIMHGDNDTLVSPKQTQILHETLIGKGVDSTYYVIKGAGHGGPHWNQTQVTDILVDFLNKTFKPAKK

SEQ ID NO: 583 - DNA, 756 bp, Unknown
  Obtained from environmental sample
gtgaactgcaaaactttgaaacgctcattgccgatgttactcataggaggtgaaaccggggtattgttcatccacggctttaccggatcgccgcatgactttgaatacatggcgagaaaagttcatgaggcaggcttcacagtttcagtaccgaggcttccaggacacggtacgtgtggggaagatttcttgaagactaccacgaacgattggttgaggaggaccttcgatgcttattacgacttgaaagccatctgtaaagacgtacacatcgtgggactctctatgggtggggtcatagctttgataatggcttcgatcctcaaaccaaaaaagcttgtcacattggctgctgccacacacctcgctgacaatcgaatcaagatcgctcggtttgttagtctcttcaagaaaaaaatcctgaaagaaagctcgcagacttacgatgatccagaatatgaatttctcaacaaagagtattggtctttcaattggcccaagcaagcagcagaactctacaagctcatcaagatggcgagaaaaagtgtggctcagatcgtgtcggatacactcgtagttgcggctcgtaacgacaatttggttcccttagaggccgcacagttcatatacaacaacatacgttctgaaaagaaaaaacttctgatttttgaacaatctgggcacgttctgagcaacgacgtggagaaagaagcggtgactgaagctgtcataaattggttaaaaaatcaaatttag

SEQ ID NO: 584 - protein, 251 aa, Unknown
  Obtained from environmental sample
MNCKTLKRSLPMLLIGGETGVLFIHGFTGSPHDFEYMARKVHEAGFTVSVPRLPGHGTCGEDFLKTTTNDWLRRTFDAYYDLKAICKDVHIVGLSMGGVIALIMASILKPKKLVTLAAATHLADNRIKIARFVSLFKKKILKESSQTYDDPEYEFLNKEYWSFNWPKQAAELYKLIKMARKSVAQIVSDTLVVAARNDNLVPLEAAQFIYNNIRSEKKKLLIFEQSGHVLSNDVEKEAVTEAVINWLKNQI

SEQ ID NO: 585 - DNA, 945 bp, Unknown
  Obtained from environmental sample
atggtttcccccatccgcaaccgtcccgcgtcgtcgaccttcaccgccgaggcccccaagcaggcgcgttcgttcgacctgttcggtggcatcaagagcggcctggagcagctgggccgggacatcaagctgggcgtggacgcgttcgaggcgagccacctgcgcgagctgggccagatcttcgggctgaacacgccgccgccggaccgcgcggatgacggcaagttcgtgggcgccggcggcaagacgtactcgccgagcaccccgctgaaggacatcccgggcgtcaccccgaagaacaacccgaacccgaaggagaccatcctctacgtcaacggcatcatgacgccggtgagcgggcagatgcgcgagatgcaggccatcgcggaccgctcgggcgccaaggtggtgggcatccacaactccacccagggcctgacggcggacctggcgcagtgcctcaccgacaaggcggacaagggcagcaacccgccggtggacacgctcgcggacacgctctactcggagctgaaggccgggcatgacgtgcacctgatgggctacagccagggcggcatcatcaccgcccgggcgctcgcggcggtgcagcggcgcctgcagtcggaggacgggctgaccaaggcgcaggccgagcaggtgatgagccacctgaacgtggagaccttcggcgccgcctccttccgctacgtggacggccccaagtacgtgcactacatcaacaacgcggacgcggtgcccacgctgaccggcctgggcggcgacatcgacccgctcgagttcgccaagcacgcgggccgcgacgccgtcatccaccgcttcaccgacggcaccgtggacctcatcggcaaccacatggtggacacgatgtacatgccgcaccgcgtgcccttcgaggacgcgcgcgcgggcaagttcctggagtag

SEQ ID NO: 586 - protein, 314 aa, Unknown
  Obtained from environmental sample
MVSPIRNRPASSTFTAEAPKQARSFDLFGGIKSGLEQLGRDIKLGVDAFEASHLRELGQIFGLNTPPPDRADDGKFVGAGGKTYSPSTPLKDIPGVTPKNNPNPKETILYVNGIMTPVSGQMREMQAIADRSGAKVVGIHNSTQGLTADLAQCLTDKADKGSNPPVDTLADTLYSELKAGHDVHLMGYSQGGIITARALAAVQRRLQSEDGLTKAQAEQVMSHLNVETFGAASFRYVDGPKYVHYINNADAVPTLTGLGGDIDPLEFAKHAGRDAVIHRFTDGTVDLIGNHMVDTMYMPHRVPFEDARAGKFLE

SEQ ID NO: 587 - DNA, 993 bp, Unknown
  Obtained from environmental sample
atggccgctgaccagcacatcctggccgctcagaccgtgggccgccgcatactcggcgacgttcttgagcaagccgccgaatgcttcgccggcgtagttcttcgcgtaatccttgggacccagcgccgcaagcaggtcgctgaccagatcgccgatggagtcggtgatcagcgtctcccttgggccagacgtgccgcgaaaaccgatgccgatttcctgcaactggcccgcgtcatcgtacttgcccagcacctcgacctgggctgtggtatagccggccttttcgccgaagaacgtgccccgggcgtcgaccttgccggtatacccgagggtgctggcgctgatgggcgtccacccagccttctgcaccgcttcgagcgcggccttctccgaatccgggttccagggaatgcctgggatcacaccctgggagtccgtactgccgagcaatgcgccgaccagagtagccggcaagccgacgcccaggccattgtgctggtagcccacggcaaagccgttatccaggttgtggtaggtatacaacgtgatcgccatggcatcggcaaacaatgctttggagccctcggccccaaggtttttatagtcaaacacgcccatgatattgcctctcttgttgttaaatttatcgagaacgtccatcactctctaaacgcttgccccggtagtgagcgggtttgccacggcaaacccgctctcgggctcagaacgcccagtcgaggctcaagcccacgccatgcaccttgtctttgctcgccaacaggccgttgtagtcaaaattcacccgcgcgtccttgctcaacgccaggcttacgcgagcgcccaccaaggccgcatcacgggccattggcgcactttccacggcaaacgacggaccgcccgaggcaaatgccaggtgctgttcggcgtccacgctgctcaggttgtgctgccagcccaaggtgccggacacctcaagtgtctggtggtcattga

SEQ ID NO: 588 - protein, 330 aa, Unknown
  Obtained from environmental sample
MAADQHILAAQTVGRRILGDVLEQAAECFAGVVLRVILGTQRRKQVADQIADGVGDQRLPWARRAAKTDADFLQLARVIVLAQHLDLGCGIAGLFAEERAPGVDLAGIPEGAGADGRPPSLLHRFERGLLRIRVPGNAWDHTLGVRTAEQCADQSSRQADAQAIVLVAHGKAVIQVVVGIQRDRHGIGKQCFGALGPKVFIVKHAHDIASLVVKFIENVHHSLNACPGSERVCHGKPALGLRTPSRGSSPRHAPCLCSPTGRCSQNSPARPCSTPGLRERPPRPHHGPLAHFPRQTTDRPRQMPGAVRRPRCSGCAASPRCRTPQVSGGH

SEQ ID NO: 589 - DNA, 894 bp, Unknown
  Obtained from environmental sample
atggaaaaaagaagtatcactttaaaaaatggtgaagtctacaagtacgtagaacaaggccaaggggatcaagtgttattactcattcatggtaatttctcatcatcacttcacttcacaccacttttagaaagattaccaaaaaacatcaaagtgattgcaccagatttaagaggatatggtgactctagttattatagacgtataagcagtttaaatgattttgcagaagatgtacatatgtttatggaagcaaaagaaattaaatcatatcatgttgttggatggtcacttggtggtggtgttgcattagaacttgctgcacaccatccagaagctgttgaatcattagtcttaataaattcaacaacacataaaggttatccagtctttaaaaagggcgcagatggaaaaccacttgttggtgaagtctatcaatcagcagatgagatggcaaacgacccagttcaagttttaccgcttttaaaagcacaaaaggataagaactttgactttgtaagttacatctttgatgtgacgatttacacagtaaataaaccatccgtagatgataacaaactttggattaatgaatcattaaaacaaagaaatttaccagatgctgactgggcactagcaaaccttaacatgtcagatcaacacaacttttataacgctggaatgaataacatttcaaaggtgaaagcacctgtgttacacacttggggagataaggatattacagttcctgaatacatgattaaagacaatgtaaaagcattagaagaacaatcaaaattagttgtttatgagaactgtggacattcacctttagttgacgttccagatcaattaacaaaagatattttagattttataggatataaaggatga

SEQ ID NO: 590 - protein, 297 aa, Unknown
  Obtained from environmental sample
  DOMAIN (50)...(291): alpha/beta hydrolase fold
MEKRSITLKNGEVYKYVEQGQGDQVLLLIHGNFSSSLHFTPLLERLPKNIKVIAPDLRGYGDSSYYRRISSLNDFAEDVHMFMEAKEIKSYHVVGWSLGGGVALELAAHHPEAVESLVLINSTTHKGYPVFKKGADGKPLVGEVYQSADEMANDPVQVLPLLKAQKDKNFDFVSYIFDVTIYTVNKPSVDDNKLWINESLKQRNLPDADWALANLNMSDQHNFYNAGMNNISKVKAPVLHTWGDKDITVPEYMIKDNVKALEEQSKLVVYENCGHSPLVDVPDQLTKDILDFIGYKG

SEQ ID NO: 591 - DNA, 981 bp, Unknown
  Obtained from environmental sample
atggcgcgactcaccaggcggggattcgtcagggcgtcgggggcgctcgccgcggcaccggcgttcgcggcgctggcagcacgggcgcaggggccggtgccggacgcggggaatctgcgcgtcgagcgggacatcgtgttcggcaggggcgggagcctggatctcctgctcgacgtctatcgaccgccagagggcgtggcctcgaaacgcctggccatcgtgcacctcttcgggggcggcttcttcaccggcaacaagaacgccggctacatcgtgaatgacgccagggcgctcggggcccgcgggtacacgaacatctcggcgaactatcggctgcagagcgagggttcctggccggcccagatccacgacgtgaaggccgcgatccgctggacgcgcgcgaatgccgggcgcctgggcgtcgacgccgacaagatcgcggtggccgggtactcggccggcggcatgctggcgctcatggccgccggcacgaacggccgggaggagttcgagggcgacggcggcacgccgggcgtcagctcggacgtcaccgcctgcatcggcgtctacccgctcgcgagcgcccagatcgccacggggctcttccccgaggggcaggcgacgcccgagaacatcgcggccgcgtcgcccacgtcctacatcagcgatcgcttcgcgccgacgatcttcatccacggcaccagcgacggcacgatcccggcgcagtcgagcgtcgatttctgggcgaagcttcaggcgctcggcgtgccgtcggcgctgacgctgatccagggcgccgatcatgccttcgacaacagcgccttcgacgcgatcgaggtgatggcgcagtcgatcgatctcttcttcgatcggctgatcgtcaatccgacgccctatccgtcgttcggcgcgggcggcggccgtgggggacgaggcggaggccgcggccagggtggccccgcacccgggggccgggggtag

SEQ ID NO: 592 - protein, 326 aa, Unknown
  Obtained from environmental sample
MARLTRRGFVRASGALAAAPAFAALAARAQGPVPDAGNLRVERDIVFGRGGSLDLLLDVYRPPEGVASKRLAIVHLFGGGFFTGNKNAGYIVNDARALGARGYTNISANYRLQSEGSWPAQIHDVKAAIRWTRANAGRLGVDADKIAVAGYSAGGMLALMAAGTNGREEFEGDGGTPGVSSDVTACIGVYPLASAQIATGLFPEGQATPENIAAASPTSYISDRFAPTIFIHGTSDGTIPAQSSVDFWAKLQALGVPSALTLIQGADHAFDNSAFDAIEVMAQSIDLFFDRLIVNPTPYPSFGAGGGRGGRGGGRGQGGPAPGGRG

SEQ ID NO: 593 - DNA, 1233 bp, Unknown
  Obtained from environmental sample
atgaaatgccgtcggcgtgttgctcttgtgttgctcggattatggtttgtgttctgcctatctgttccgggagggcgagctgaagcggcagcctcacgcgccaatgatgcgccgattgtgcttctccatggctttaccggctggggaagagaagaaatgtttgggttcaagtactggggcggggtgcgcggcgatatcgaacaactgcttaacgcccatgggtatcgaacgtacacgttggcggtcggcccgctctcaagcaactgggaccgggcatgcgaagcgtacgcccagcttgtcggcggaacggtcgattatggtgcggcccatgcggcgaagcacggccatgcgcggtttggccgcacgtatccgggcttgctgccggaattgaaaagaggcggccgcgtccatatcatcgctcatagccaaggaggacagacggcccgcatgcttgtgtctctcctagagaacggaagcaaagaagagcgggagtacgccaaggcgcataacgtgtctttgtcaccgttgtttgaaggcggacatcattttgtgttgagtgtgacaaccattgccactcctcatgacgggacgacgcttgtcaacatggttgatttcaccgatcgcttctttgacctgcaaaaagcggtgttgaaagcagcggctgtcgccagcaatgtgccatacacgagtcaagtatacgattttaagctcgaccaatgggggctgcgccgtcagccgggtgaatcgtttgaccaatattttgagcggctcaaacagtcccccgtttggacgtccgcagataccgcccgctatgatttatccgttcccggtgcggaggcgctgaaccaatgggtgcaagcaagtccgaacacgtattatttgagctttgccacagaacggacgtatcgcggagcactcacaggcaactattatcccgaactggggatgaatgtattcagcgccgccgtatgcgccccgtttctcggctcgtaccgcaatgcggcgcttggcattgacgaccgctggcttgagaacgatggcatcgtcaacacgttttcgatgaacgggccgaagcgtggatcgaccgatcggatcgtgccgtatgacgggacgttgaaaaaaggagtttggaatgacatgggaacgtacaatgtcgatcatttggaagtgatcggcgttgacccgaatccgttgtttgatattcgcgccttttacttgcgccttgccgagcaa

SEQ ID NO: 594 - protein, 411 aa, Unknown
  Obtained from environmental sample
  SIGNAL (1)...(29)
MKCRRRVALVLLGLWFVFCLSVPGGRAEAAASRANDAPIVLLHGFTGWGREEMFGFKYWGGVRGDIEQLLNAHGYRTYTLAVGPLSSNWDRACEAYAQLVGGTVDYGAAHAAKHGHARFGRTYPGLLPELKRGGRVHIIAHSQGGQTARMLVSLLENGSKEEREYAKAHNVSLSPLFEGGHHFVLSVTTIATPHDGTTLVNMVDFTDRFFDLQKAVLKAAAVASNVPYTSQVYDFKLDQWGLRRQPGESFDQYFERLKQSPVWTSADTARYDLSVPGAEALNQWVQASPNTYYLSFATERTYRGALTGNYYPELGMNVFSAAVCAPFLGSYRNAALGIDDRWLENDGIVNTFSMNGPKRGSTDRIVPYDGTLKKGVWNDMGTYNVDHLEVIGVDPNPLFDIRAFYLRLAEQ

SEQ ID NO: 595 - DNA, 1704 bp, Unknown
  Obtained from environmental sample
atgtttcacggcgtgcagccgcggctcgggctggtgacaccggcactggagaccgagcatctcgacgcagcggacggacggtattggttgcggcttgaatggcgcgccctcgcccgggcactgcgtgaaacaggagagcagcgcaatatcgcggtccgcgacgcgctcgcgttccggcaagcccggcgcatgctctacccagccagtgtcgacgacgagcgcggccaggagatcggcgaagggctcgccgcgtacaccggcaccgtactcgcggcggagtctgcggccgacgcgatcgtgagcgcggtcgacctgctgaccggcatcgaggcagcggctctggaggcgagcttcgttcggacgtttgcgtacgtgtcaggacctgcgtacggcctcctgctcgatgcgtcgtcgagcgactggaggcgcagggtgcgcggcagcgacgatctcggcacgctcctgatgcgcgcgctcgcggttcaaccagccaccgatcccacggcgtctgcaacccgatacggcggcggcgagatccgcgcatccgaacagcagcgcgatgatgagcggcagcaacgtatcgccaaattgcgccagcgcttcgtcgacggtccggtgctcgtgatcccaggaggcggcagcggcatgtccgattcccggggcgcgaccgtgattccgggccacgggacggtgtacttcggtccctatcgtgcctcgagcggttggggcacgctcgaagcggagaagggcgtgctgatcgcgagtgacggcggctcgcgccgtgtgtcggcgcccgtccggcgcgatgacggtacgtttgctggggacggatggatggtcacggtgggaccgggctgggtcgtgcgtgaaggagcacggcggggtgactacgaagtcgtccggcttgacgagcccgcgcgtccgctctcggtcacgacggacgtggtgtacgggcacaaggatggtctggcgctcacgttcgacgtgcatcgcccagcgcagcccaatggcgccgccgtcatcgcgatcgtgagcggcgggtggcaatcgagcgtggagttgagccgtcctatcgtggacgaccatctctccccgttgttgaacgagaagggattcaccgtattcgccgtgagacacggcagcagcccgcggtatcccatgtccgcgatcgtggcggacgtgcggcgggccgtccgtttcatccgtcagcacgcgggtgagtacggcgtggaccccaaccgcattggcgtttatggcggcagcgccggcgggcagctcgcgttgctgctcggcacgacagccgactccggggatccgtcggcctctgatgccgtgctcagggaatccagtcgcgtcgcggcggttgtggcgtactttgcgcccacggatctctctcgatttgcgaacaagaggtcgttcccggccacggcggcgttgacggaggccgaagcggcggagtactcacccattcgcttcgtctcgcccggggctgctccctcactcatcgtgcacggcgacgccgacacagtcgtcccgatggtcgagggggagacgatgcacgaggcgctgacgaaggcgggcgtgatcgcatcgttcattcgcgttgaacgcgctgggcacgcgttcgagggcgccgatctcgagcgggtcaacgccgcaatggtgcagtggttcgagcggcatctcgggagcgcggcgaggtag

SEQ ID NO: 596 - protein, 567 aa, Unknown
  Obtained from environmental sample
MFHGVQPRLGLVTPALETEHLDAADGRYWLRLEWRALARALRETGEQRNIAVRDALAFRQARRMLYPASVDDERGQEIGEGLAAYTGTVLAAESAADAIVSAVDLLTGIEAAALEASFVRTFAYVSGPAYGLLLDASSSDWRRRVRGSDDLGTLLMRALAVQPATDPTASATRYGGGEIRASEQQRDDERQQRIAKLRQRFVDGPVLVIPGGGSGMSDSRGATVIPGHGTVYFGPYRASSGWGTLEAEKGVLIASDGGSRRVSAPVRRDDGTFAGDGWMVTVGPGWVVREGARRGDYEVVRLDEPARPLSVTTDVVYGHKDGLALTFDVHRPAQPNGAAVIAIVSGGWQSSVELSRPIVDDHLSPLLNEKGFTVFAVRHGSSPRYPMSAIVADVRRAVRFIRQHAGEYGVDPNRIGVYGGSAGGQLALLLGTTADSGDPSASDAVLRESSRVAAVVAYFAPTDLSRFANKRSFPATAALTEAEAAEYSPIRFVSPGAAPSLIVHGDADTVVPMVEGETMHEALTKAGVIASFIRVERAGHAFEGADLERVNAAMVQWFERHLGSAAR

SEQ ID NO: 597 - DNA, 813 bp, Unknown
  Obtained from environmental sample
atggctacccaacctcgcgaagagatgatctcggtcggcgggatcaaggtgcacacactgatcgggggacacggcgacccggtactcgttctgcacggggccggcggatcgctcggctggcggcgctggctcgaccggctcgccgaaaacttcaccgtgtacgcgccgtcgcaccccggctacgaccggtcggacagtgccgactggatggagagcgtgcgggatatcgcccgcttttacctctggttcctcgatgtcgtgggacaggaccgggtccacgtgatcggttcctccatgggcggctggacggccgctgaattggccgtaatgaatcctcacgtcgtgaaccggctggtgttggtcgatccggtcggcctgaagccggagcagggagagatcctcgacatctttttcctttccccggaggaagtgttcgcgaaggcctactacaacgcggagcaggccccggagtacgcggaactctatggtcagccgccgaccgccgagcagcgggacattcagatgcgcaaccgggagatggcggcccggatcacctggaagccgtacatgcacaatccccgcctgccgcacttcctgccgcgggtgacggtgccgacgctgatcgtctggggccgggaagacgagatcgtcccactggagtgtggggaacagtaccagcggctcctgccgaacgcgacgctccgcgtgatcgaccagtgcgggcactcgccccagatcgagaagccggatgagttcctgagcctcgtcaccgagtttctgggcgtggccagtccggccggcgcaaagcagtga

SEQ ID NO: 598 - protein, 270 aa, Unknown
  Obtained from environmental sample
  DOMAIN (51)...(258): alpha/beta hydrolase fold
MATQPREEMISVGGIKVHTLIGGHGDPVLVLHGAGGSLGWRRWLDRLAENFTVYAPSHPGYDRSDSADWMESVRDIARFYLWFLDVVGQDRVHVIGSSMGGWTAAELAVMNPHVVNRLVLVDPVGLKPEQGEILDIFFLSPEEVFAKAYYNAEQAPEYAELYGQPPTAEQRDIQMRNREMAARITWKPYMHNPRLPHFLPRVTVPTLIVWGREDEIVPLECGEQYQRLLPNATLRVIDQCGHSPQIEKPDEFLSLVTEFLGVASPAGAKQ

SEQ ID NO: 599 - DNA, 1425 bp, Unknown
  Obtained from environmental sample
atgggtatctttgactataaaaacctcggtaccgaggactccaaggcgttgttcgccgatgccatggcgatcacgctgtattcctaccacaacctggataacggctttgccgtcggttaccagaacaacggcctcgggctgggcttgcctgccaccctggtcagcgcgctgattggcggcagcaatgcccaaggggtcatccccgggatcccctggaaccccgactcggaaaaagccgccctggaggcggtgcaagcagccggctggacgcccatcagcgccagtaccctgggctacagcggcaaggtcgatgcgcgcggcaccttctttggcgaaaaattcggctacggcacggcgcaggctgaggtgctgggcaagtacgatgatgcgggcaagctgcaggaaatcggcatcagttttcgcggcacttcggggcctcgggaaagcgtgatcaccgactccatcggcgatgtgatcagcgacctgctcgccgccttcgggcccaaggattatgccaagaactacgcgggggaagccttcggcggcttgctcaaaaacgtggcggactacgccagtgcccagggcctgggcggcaatgacgtggtggttagcggccacagccttgggggcctcgcggtcaacagcatggccgacttgagcgacaacagctggtcggggttctataaggactccaactacgtggcctacgcatcgccgacccagagcgccggcgacaaggtgcttaacgtcggctatgaaaacgacccggtgttccgcgccctggatggctcgtcattcaacctgtcgtccctgggcgtgcacgacaagccccacgagtcgagcaccgacaacatcgtcagcttcaacgaccactacgcttcatccctgtggaacctgctgccattttccatcctcaacctgcccacctgggtctcgcacttgcccaccggttacggcgacggcatgacccgcatcctcgactcgggcttctacgaacagatgacccgcgactcgacggtgatcgtcgccaacctgtccgatccggcacgggccaccacctgggtgcaagacctcaaccgcaatgccgaggcgcacaagggcaataccttcatcattggcagtgacggcgacgacttgatcaaaggcggcaggggcgcggactttatcgaaggtggcaagggcaatgacaccatccgtgacagcagcgggcataacacgtttttgtttagcgggcagtttggcaatgaccgggtgattggctaccagacgacggacaagctggtgttcaacgacgtggcgggcagcaccgattaccgcgaccacgtcaaggtggtgggcgcggataccgtcattagctttggtacggattcggtgacgctggtgggtgtgagcagtctgtcgggggaggggatagtcatcagctaa

SEQ ID NO: 600 - protein, 474 aa, Unknown
  Obtained from environmental sample
  DOMAIN (133)...(265): Lipase (class 3)
MGIFDYKNLGTEDSKALFADAMAITLYSYHNLDNGFAVGYQNNGLGLGLPATLVSALIGGSNAQGVIPGIPWNPDSEKAALEAVQAAGWTPISASTLGYSGKVDARGTFFGEKFGYGTAQAEVLGKYDDAGKLQEIGISFRGTSGPRESVITDSIGDVISDLLAAFGPKDYAKNYAGEAFGGLLKNVADYASAQGLGGNDVVVSGHSLGGLAVNSMADLSDNSWSGFYKDSNYVAYASPTQSAGDKVLNVGYENDPVFRALDGSSFNLSSLGVHDKPHESSTDNIVSFNDHYASSLWNLLPFSILNLPTWVSHLPTGYGDGMTRILDSGFYEQMTRDSTVIVANLSDPARATTWVQDLNRNAEAHKGNTFIIGSDGDDLIKGGRGADFIEGGKGNDTIRDSSGHNTFLFSGQFGNDRVIGYQTTDKLVFNDVAGSTDYRDHVKVVGADTVISFGTDSVTLVGVSSLSGEGIVIS

SEQ ID NO: 601 - DNA, 951 bp, Unknown
  Obtained from environmental sample
atgcgaacccgtactttcggcgcggtgattctcggggctctactcgtactgtgcgtcggatgctcccgtcgaaccgtgcccggagcggacatggcttcacctccacgccagctgctgaccccggcagagctccaggccttgccggtgcaggccccggatcagcgactcgcgtacggggaggagcccagccagtatggcgaattgcgggtgccatcgcacggtgggcctcaccctgtcgtggtcctcattcacggaggctgctggaaagagccctacgccacactccgcgacctcgctccgatgggcgatgcattgaaagcggagggcgtggcgacctggaacatcgaataccggcgactttaccagccgggcagcgggtggccgggcacgtacctcgacgtggggcgcgcggtcgatcacctccgcgcaattgccgcacagtaccccctcgatctcgaccgcgtcgttgttgtaggtcattcggccggtgggcacctggcgatgtgggtggcggcgcggacccgtctggggagagagagccccctcttcgtcgctgacccactgccggtgcgcggcgtcatcaacctggccggcaggatcgatatggccgacaacatcgcggcgtacgaggccgcgtgcggcgatactgtcgtcactgctatgctgggtggcacacccgccgaggtgcctgagcgctacaccgaagtctcggcgatcacgagcgttccactcggcattccccaggtgctcatctggggcgagcacgaggagttcgtgccctttgccgtcgtgcagaagtacgtgcgaacggccacgcaggctggagattccgtgcggctggtggtgattcccagcgtcggtcatttcgagactgccagcccgttctcttccgcgtggcccaccgtgcgatcggcgattcgatcgctgctcgagggccggctgccgcagtga

SEQ ID NO: 602 - protein, 316 aa, Unknown
  Obtained from environmental sample
  SIGNAL (1)...(32)
MRTRTFGAVILGALLVLCVGCSRRTVPGADMASPPRQLLTPAELQALPVQAPDQRLAYGEEPSQYGELRVPSHGGPHPVVVLIHGGCWKEPYATLRDLAPMGDALKAEGVATWNIEYRRLYQPGSGWPGTYLDVGRAVDHLRAIAAQYPLDLDRVVVVGHSAGGHLAMWVAARTRLGRESPLFVADPLPVRGVINLAGRIDMADNIAAYEAACGDTVVTAMLGGTPAEVPERYTEVSAITSVPLGIPQVLIWGEHEEFVPFAVVQKYVRTATQAGDSVRLVVIPSVGHFETASPFSSAWPTVRSAIRSLLEGRLPQ

SEQ ID NO: 603 - DNA, 1575 bp, Unknown
  Obtained from environmental sample
atgcgcaagatgctgctgctgttgatcctgttgaccggcctgtcacctgccgcctgggcggtgaccgtcaccaccacccatcagacgatacccagctgggacggaacaccgctcggggtattcgtcatccagccgcaggggcagggcgagggacgccttccgctgctggtcatgcccagcagttgggccgttcccagcgtggaatatgtcggcgtcgcgcaggcgctggcccagcgtggctatatcgtgctcagctacagttcgcgcggattctgggagtcgggtggggcgatcgacatcgccggacccgccaccgtcgaagatgtcagcgcgctgatcgactgggcgctggacaacacccgggccgatcccgcccgcatcggtgtgtccggcatctcctacggcgccggcaccagtctgctggcggcggcgcgtgatccgcgcatcaaggcggtggccgcactgagcggctgggccgacctgcaggcggcgctgtacagcaacaacacgcccagcgcgcagggcattgccctgctggtggccgccggcatggccaccggtcgtcccggtgaggagctggccacgatcaaccgcaaggtggtgaccggcaacttccagggcgcggtggaatcgctgctgccggttgcggcactgcgcagtccgtccgccagcgtggcggagatcaacgccaaccgccccgccattttcctggccaatgccttcaacgacagcctgttcccgcccggccagctggtggacttcttcaatgcgctgaccggtcccaagcagctgcagctgcgtcatggcgatcacgccctcaacgaggcgctgggtgcgctgggggtgccgaatgaggtctacgcctcggtgggggactggttcgatcactacctcaagggcgtggcgaacggcatcgaccgtgccccggccgtgcagctgaagtcgcagaagggcagctggaacacctatgcagactggcaggcgacccgtgccggcgcgacccagtacgcgctgaccgcgccgggcggactgctgcttcccacgggtggcctggtcgagaacgggcgcagcagcggctggagctaccgcatcggcagtggcctgccgaccgccgccaactccggtgtcgcgatggtgtccggctccctgcagatgatcaacgttgcgcctggcgcctacgtgcccttcatcggccgcaatgccgccggcgtctggcagagcccggtctactggagcgcccgtcgcatggacggcatgccggaagtgcgcgtcaccgtcacccccagccgggccgacaccacgctctatgcgtatctgttcgtcgaggacgtcctcggcaacgggcagctgatcagccacaagccgtacaccctgcgcagcgcgaccccagggcaggcccgcacgctcgatctgcgtcttgaagcgagcagctggaacatcccggccggaagccggctgaccctggtgatcgacaccgtggacctgcgctatgccggcgtcagccagctgggcggaacggtcgccttcagttccccggccaacgcaccttcagtcctgcgggtgcccttgcactga

SEQ ID NO: 604 - protein, 524 aa, Unknown
  Obtained from environmental sample
  SIGNAL (1)...(20)
  DOMAIN (34)...(520): X-Pro dipeptidyl-peptidase (S15 family)
MRKMLLLLILLTGLSPAAWAVTVTTTHQTIPSWDGTPLGVFVIQPQGQGEGRLPLLVMPSSWAVPSVEYVGVAQALAQRGYIVLSYSSRGFWESGGAIDIAGPATVEDVSALIDWALDNTRADPARIGVSGISYGAGTSLLAAARDPRIKAVAALSGWADLQAALYSNNTPSAQGIALLVAAGMATGRPGEELATINRKVVTGNFQGAVESLLPVAALRSPSASVAEINANRPAIFLANAFNDSLFPPGQLVDFFNALTGPKQLQLRHGDHALNEALGALGVPNEVYASVGDWFDHYLKGVANGIDRAPAVQLKSQKGSWNTYADWQATRAGATQYALTAPGGLLLPTGGLVENGRSSGWSYRIGSGLPTAANSGVAMVSGSLQMINVAPGAYVPFIGRNAAGVWQSPVYWSARRMDGMPEVRVTVTPSRADTTLYAYLFVEDVLGNGQLISHKPYTLRSATPGQARTLDLRLEASSWNIPAGSRLTLVIDTVDLRYAGVSQLGGTVAFSSPANAPSVLRVPLH

SEQ ID NO: 605 - DNA, 921 bp, Unknown
  Obtained from environmental sample
atggggaacgagcggaggaacaggccggacgggaacccggtgtgggaggttgccgggcgggcggctcgggcggtgggggtgctggttttggcgctggcgctgagccagtgcgcggcgagggcccccggggtggcgcgggtggcgacggtgacgcgggacgtggtttatacgccggcggcgtggccggaggagatccaggcagacctttaccggccggtggagagcgagctggctcctgcggtggtgttgatccatgggggcgggtggacgacgccggacctgcgctggcagatgcgcgggatcgcgcgggatctggcgaagagggggtattttgtgatgaatctgacctatcgcagcgcggaggactgggtgtatcccgcgccggtggacgacgtgggtgcggcgctggattggatcgaggcgaatgcggcggagcatgggatcgatgcgcggcggatcgcgacgtttggttactcggcgggggggcatctggctttgttgagcgggttgcgggacacgcgggtgaaggcgatcgtagcgggggcggcgccgagcgatcttatgctcttcgacggcgggcggctggtgcaggcgttcatcggcgggacgcggcaggagtttccggagcgttaccgcgcggcttcgccggtgcatcaggtgcggccgggggctccgccggttttcctctatcatggggtgcgggacgggctgattccggcgtttcactcggagatcatgagcggcgcgctggcgcaggcgggggtgcctcacgaggtgtatttcctgaggcggaagaatcacgtcacggcgttcatgttcgggagcgaggcgacggatcgggcgatcgattttttggaccggacgttgagggtgtcgcgcttgccgggtgggggcgggtctgagagaggcggtgggcgatga

SEQ ID NO: 606 - protein, 306 aa, Unknown
  Obtained from environmental sample
MGNERRNRPDGNPVWEVAGRAARAVGVLVLALALSQCAARAPGVARVATVTRDVVYTPAAWPEEIQADLYRPVESELAPAVVLIHGGGWTTPDLRWQMRGIARDLAKRGYFVMNLTYRSAEDWVYPAPVDDVGAALDWIEANAAEHGIDARRIATFGYSAGGHLALLSGLRDTRVKAIVAGAAPSDLMLFDGGRLVQAFIGGTRQEFPERYRAASPVHQVRPGAPPVFLYHGVRDGLIPAFHSEIMSGALAQAGVPHEVYFLRRKNHVTAFMFGSEATDRAIDFLDRTLRVSRLPGGGGSERGGGR

SEQ ID NO: 607 - DNA, 777 bp, Unknown
  Obtained from environmental sample
atgcttgtcaagacacttgtcgccatagcgatgatcgcggttgtcgtgccggtcgtcatgatcggcggcattccgctgcagatcctgctcggtgtcatcgcggcgatggctgcttttgaaaccgcccgtctgtttgacaaaaacccgtgggtcatggcagccctgggcttctttgcgatcgcggccctttactatgtgccggccagccacctggcggcggtgattgccgcatggctggtggtgctgtttgggattgagcttgcggatgagaatgtcacgactgatcttgtcacctataccttcacgatgacgatgctcactggtcttgcgatccgctgcgtgcagcagctgtataccgacagcgcgaccgctgtctatgtgctgctttatattgcctttgcctgcttcggctgcgatacaggcgcttatttcttcggcgttttcttcggaaagcacaagatgattccgcgcgtttccccgaacaagacatgggagggagccatcggcggctacgcgaccggtgccgtgatgtcctttgtctggggtatcttattctgtgcccatctgccgctgacgctgcgccttgccggaagcctgatcctgccggcggtcgcccagctcggcgatctggctttctcaagcatcaagagaagattcggcgtcaaggacctcggcaatatcttcccgggccacggcggcattcttgaccgggtagactcgattatcttctgcctgatggtattcaacggacttatgatcctgtgggggctcgcatga

SEQ ID NO: 608 - protein, 258 aa, Unknown
  Obtained from environmental sample
  SIGNAL (1)...(37)
  DOMAIN (1)...(255): Cytidylyltransferase family
MLVKTLVAIAMIAVVVPVVMIGGIPLQILLGVIAAMAAFETARLFDKNPWVMAALGFFAIAALYYVPASHLAAVIAAWLVVLFGIELADENVTTDLVTYTFTMTMLTGLAIRCVQQLYTDSATAVYVLLYIAFACFGCDTGAYFFGVFFGKHKMIPRVSPNKTWEGAIGGYATGAVMSFVWGILFCAHLPLTLRLAGSLILPAVAQLGDLAFSSIKRRFGVKDLGNIFPGHGGILDRVDSIIFCLMVFNGLMILWGLA

SEQ ID NO: 609 - DNA, 963 bp, Unknown
  Obtained from environmental sample
atgcgccgtatcgcgcggtcaattaattttcgtttgctgttcgcggcgatggcgttcgtcgttgcgccggcaacatcggcccaggcgcaaaacgacaagatgacacccatcgctactcccgcacagcccaatgcgatcgagatcggcaccggtccgctgcccgatgcgaagaaccccgagtcctggcatagccagtacggcagcaagtttgcccgcaacgtaacgattgcgacgctgacaccatttctgccggatgctgccagggccagcggcgccgcggtcatcgtggcgcccggcggcggtttccgcaccttgtccatggaaaatgaagggtggaacgtcgcgcgcgccttggccgaaaagggcgtcgctgcgttcgtcctgaagtatcgattgaatcagactccggcggacatgccgggcttcgagcagtccatgcgagaaatgttttcgggaacagcgcggccgccgcgccccgacccagcgaaggctatcgccggtctcgctccgcaaatcgccgatgcccgcgcggcatttgcactaatcaggaaacgttcttccgaatggcacgtcgatcccaaccggatcggcatggtcggcttttccgccggcgctatgttgaccatggcgaccgcgctcgcgggcgaggatgcgaagccggctttcatcggcaacatctacggtccgctcgccccggtcaccgtgccggccgacgcgccgccattattcatcgcgcttgctgccgacgatcctttcttcgcgaacggcggctttgggctcatcgatagctggaagacagcgaagcggcccgtcgaattccatctttatgaacagggtggccatggcttcgggatgtatccgaaagaaacgacgagcaccggctggttcgaagccttcgtgcggtggattggaatgcacggcatgcttaagccggcagcgtcaggaagcggcggcgcgaagtag

SEQ ID NO: 610 - protein, 320 aa, Unknown
  Obtained from environmental sample
  SIGNAL (1)...(29)
MRRIARSINFRLLFAAMAFVVAPATSAQAQNDKMTPIATPAQPNAIEIGTGPLPDAKNPESWHSQYGSKFARNVTIATLTPFLPDAARASGAAVIVAPGGGFRTLSMENEGWNVARALAEKGVAAFVLKYRLNQTPADMPGFEQSMREMFSGTARPPRPDPAKAIAGLAPQIADARAAFALIRKRSSEWHVDPNRIGMVGFSAGAMLTMATALAGEDAKPAFIGNIYGPLAPVTVPADAPPLFIALAADDPFFANGGFGLIDSWKTAKRPVEFHLYEQGGHGFGMYPKETTSTGWFEAFVRWIGMHGMLKPAASGSGGAK

SEQ ID NO: 611 - DNA, 1071 bp, Unknown
  Obtained from environmental sample
atgggtgcgaataatccggtcacaaaatttgtaatggataaggggcagggcactgcagcacgtttgctggattgcctgccgagctttgcacaagaacgtctggtaaaagcattggattatccttatgactatcctgatttggatccttatataaaatgcttgatggcgattcagattaaacagggagagcacagttttattagtgcagatgcggtgcagtcacgtcaactgtttgatgaacgcatgaaagctattcaggcgaaaccgacgccggtcaaggcagtcgaggatctgcgtttgccattgcaaaatggcactatctttgcccgacattatcatccggcaccacagaaaaaattgccgatggtcattttctatcatggtggtgcatttatagtgggtggtctggatacgcatgatgagttctgccgtttattggcggtgcatgccaaggtgcaggtactcagcgtggcttatccgctaacgcccgaatacagtcctttgcagatggtacaggtctgtgaagatgctctggcttgggtacatcaaaacatcaagcagttgaaaatctataaaaaccagattgtagtggcaggggatagtgcaggtggaaatctggcggcagtggttgcgcagcggagtgccgataaaatctatgcacctcgcgcacagttattgctttacccggctgtcgattttaaaagccgccatccttctttttatgcatacaatcagggcctggtactttcagctcaggatattgatctggtgaccaagctatatgctgaaacacatcaggtcgaactggatgatccgctgatttcaccgacctatggtgaactgaagaatctgccgcctgcctatgtgattaccgcccgtcatgatgtgttgcatgatgagggttcaatctatgcgctgaagttacgtgagaatggggtgcgagtgtattatcaggagtatacggatcaggcccacggttttatcaatctgaccccaattcataaacgttcgaaaaagcaggtcattgaactcagcaagaatttccgtaaattcctggataaaaagatctga

SEQ ID NO: 612 - protein, 356 aa, Unknown
  Obtained from environmental sample
MGANNPVTKFVMDKGQGTAARLLDCLPSFAQERLVKALDYPYDYPDLDPYIKCLMAIQIKQGEHSFISADAVQSRQLFDERMKAIQAKPTPVKAVEDLRLPLQNGTIFARHYHPAPQKKLPMVIFYHGGAFIVGGLDTHDEFCRLLAVHAKVQVLSVAYPLTPEYSPLQMVQVCEDALAWVHQNIKQLKIYKNQIVVAGDSAGGNLAAVVAQRSADKIYAPRAQLLLYPAVDFKSRHPSFYAYNQGLVLSAQDIDLVTKLYAETHQVELDDPLISPTYGELKNLPPAYVITARHDVLHDEGSIYALKLRENGVRVYYQEYTDQAHGFINLTPIHKRSKKQVIELSKNFRKFLDKKI

SEQ ID NO: 613 - DNA, 834 bp, Unknown
  Obtained from environmental sample
atgacatttccaatcattctggcgcacggagtctgccggttcgacgtggtgacgaatgatctgctcaaactcgacaacaacgatgaccccacgctcgatcggttgcactattttcggggtattcgcaccatgttgaaagccaatgggttttgcgtctaccactccaacgtcgggtgggccgccgatgtcaaaacccgggcagaaggcttgagaatcaacattgaagaggtgttgagaaaggaaaatgccaggaaggtaaacatcatcggccacagcatgggcgggctggacagccggcacatgctgttcgatgggcgaaactcgaaccggattcacgaacggattgcatcgttgaccacgatctcaaccccgcacgaaggttctcctttcgccgattggggcattgacaatctgccgcaggtgattccggccgccagactgctcggattggatctgaaggcactcagtgacctgcgaaccgaccggtgcgtggcgttcaacaacgatccggaggtggtcggattcgaacaggaatgcgagaaaacaatccggtttcaaacctatgccggaaaacagaaattctggggcatttttgaagcgttgaaactgccgttttacatcatcgaaaagcgtgaaggcgaaaatgacggcctggtgtcggtgaagtccgccaagtggagagaacgttatttcaagggaacaatcgacgatacggaccatctgaacgagttgggctggtgggagccggcgcaggtctatgcgggtgaaggcccagaccaactgctgaaaaggatccacaagctctatttggaaattgcgcaaggccttccttag

SEQ ID NO: 614 - protein, 277 aa, Unknown
  Obtained from environmental sample
MTFPIILAHGVCRFDVVTNDLLKLDNNDDPTLDRLHYFRGIRTMLKANGFCVYHSNVGWAADVKTRAEGLRINIEEVLRKENARKVNIIGHSMGGLDSRHMLFDGRNSNRIHERIASLTTISTPHEGSPFADWGIDNLPQVIPAARLLGLDLKALSDLRTDRCVAFNNDPEVVGFEQECEKTIRFQTYAGKQKFWGIFEALKLPFYIIEKREGENDGLVSVKSAKWRERYFKGTIDDTDHLNELGWWEPAQVYAGEGPDQLLKRIHKLYLEIAQGLP

SEQ ID NO: 615 - DNA, 1197 bp, Unknown
  Obtained from environmental sample
atgaacgcaacctccgcaacgatcgccgccaccgacacccagcagcgcggtggcttcgccggcaccgatccgcaaccggtcgatcgggtgctggccgcactgatccaggacaactacgaccgcgtcgaccagcgtcgcggcgacccgccgatcgaccgcccgctgccgcagggctgggcgcgcatgggcgacgacgaagtgcgcgccgcgggcatcgatcctgcgatgcagcacgatgccaagagcggcttcgacgcctcgttctaccgcgacgaccagggccgggtggccctggtctatgccggcagcgacgagggccaggactggaagcacaacttcggccagggcctgggtttccaggacgcgcagtacgaccaggcgatcgcgctggcgcgcgaggcgaaatcggccttcggcgaccagctcgtgctgtcgggccagtcgctcggcggcggcctggccgcggcagcgtccatggtcaacgaggtgcccgcggtgaccttcaacgccgccggcgtgcacgaccacacggtcgagcgctacggcctggacgcggacgcggtcaagcgccaggcggaccagggcctggtccggcactacgtggtcgagaacgacatcctgacccacctgcaggagaacgcgttcccgctcaatgcggcgatgccggatgcgcccggcgcgcgcatcgacctgcccgatccggatccgctgaccacgttcgagaagctgctgccctggaagacctggccgcaccgcgtgcataaccactacatcgaggcggtgatcgagtccatggacaaggccggctacacgctcgaaggcgcggcggcgacgcgggatgcgtcgcaggacaccgccaaccggctgctcgacgattcggtgcgcgggctcgcgccgcagcgcgaacgcctcgggctgcaggacgacgaccgcttcttcaacgcggccgccggcatggccgcctcggccggacgcgatggcctgcgcagcatccagcacgtggtcgccacgcccgacggccacggcgtgttcgcggtcgaaggcgacctgcgcgacgccggccaccgccgcagcctggtcgacgtggaacgcggcgccgcgacgccggtcgaggacagcgtggccagcctgcgcgagcacgcctcgcgttccccggagcaggagccgcagcgggagcgccacctggcgatggcctga

SEQ ID NO: 616 - protein, 398 aa, Unknown
  Obtained from environmental sample
MNATSATIAATDTQQRGGFAGTDPQPVDRVLAALIQDNYDRVDQRRGDPPIDRPLPQGWARMGDDEVRAAGIDPAMQHDAKSGFDASFYRDDQGRVALVYAGSDEGQDWKHNFGQGLGFQDAQYDQAIALAREAKSAFGDQLVLSGQSLGGGLAAAASMVNEVPAVTFNAAGVHDHTVERYGLDADAVKRQADQGLVRHYVVENDILTHLQENAFPLNAAMPDAPGARIDLPDPDPLTTFEKLLPWKTWPHRVHNHYIEAVIESMDKAGYTLEGAAATRDASQDTANRLLDDSVRGLAPQRERLGLQDDDRFFNAAAGMAASAGRDGLRSIQHVVATPDGHGVFAVEGDLRDAGHRRSLVDVERGAATPVEDSVASLREHASRSPEQEPQRERHLAMA

SEQ ID NO: 617 - DNA, 933 bp, Bacteria
atgccgctcgatcccgtcattcagcaggtgctcgatcaactcaaccgcatgcctgccccggactacaaacatctctccgcccagcaatttcgttcccaacagtcgctgtttcctcctgtcaagaaggagcccgtggccgaggtccgagagtttgacatggatctgcctggccgcacgctcaaggtgcgcatgtaccgcccggagggcgtcgaaccgccctaccccgcgctcgtgtattatcacggcggcggttgggtcgtcggagacctcgagacgcacgatcccgtctgccgcgtcctcgcgaaagacggccgcgcggtcgtgttctccgtcgactaccgcctggcgccggagcacaagttccctgccgccgtggaagacgcctacgacgcgcttcagtggatcgcggagcgcgcagcggactttcatctcgatccagcccgcatcgcggtcggcggagacagcgccggagggaatcttgccgctgtgacgagcatccttgccaaagagcgcggcgggccggccatcgcgttccagctgctcatctacccttccacggggtacgatccggctcatcctcccgcatctatcgaagaaaatgcggaaggctatctcctgaccggcggcatgatgctctggttccgggatcaatacttgaacagcctggaggaactcacgcatccgtggttttcacccgtcctctacccggaattgagcggcttgcctccggcgtacatcgcgacggcgcagtacgatccgctgcgcgacgtcggcaagctttacgcggaagcgctgaacaaggcgggcgtcaaggtcgagatcgagaacttcgaagatctgatccacggattcgcacagttttacagcctttcgcctggcgcgacgaaggcgcttgtccgcattgcggagaaacttcgagacgcgctggcctga

SEQ ID NO: 618 - protein, 310 aa, Bacteria
MPLDPVIQQVLDQLNRMPAPDYKHLSAQQFRSQQSLFPPVKKEPVAEVREFDMDLPGRTLKVRMYRPEGVEPPYPALVYYHGGGWVVGDLETHDPVCRVLAKDGRAVVFSVDYRLAPEHKFPAAVEDAYDALQWIAERAADFHLDPARIAVGGDSAGGNLAAVTSILAKERGGPAIAFQLLIYPSTGYDPAHPPASIEENAEGYLLTGGMMLWFRDQYLNSLEELTHPWFSPVLYPELSGLPPAYIATAQYDPLRDVGKLYAEALNKAGVKVEIENFEDLIHGFAQFYSLSPGATKALVRIAEKLRDALA

SEQ ID NO: 619 - DNA, 1710 bp, Unknown
  Obtained from environmental sample
atggctgacaacgagttgcccctggcgcggcccagggagacgccgccgtgccgccccggcacgttcgagcttgggctcgccctggctggcgcggtctctggcggcgcctacgccgcgggagtcctggatttcttctacgaagccctcgagcattggtacgaggccagggaggcgggagcgccggtgcccaaccacgacgtgctcctccggatcatctcgggtgcgtcggcgggcagtatcaatggcgtgctttcgggcatcgcgctgccgtaccgttttccccacgtgcacagcgggcccgcgcccgagggtgccacgggcaaccccttctacgacgcctgggtgaagcgcatcgacgtgcgcgaactgttgggcaacgaagacctggccgatcccacgcagccggtggcatccctgctcgacgccacctgcctggatacgatcgcgaaggacatgctcggcttctcggcggcgccggccacccggccgtacgtcgctaatccgctgaaatgcgtgttcacggtgaccaacctgcgtggcgttccttacgtcgtgcagttcaagggaaacccggagatccccggccacggcatgatggcccacgccgactggctgcgcttcgccgtcgacaccgggcagggcgaccgggatggggaatggatgttccccgatgaacggctcgtcagcgggccgagccatgcgcggactccggcctggcaaggtttcatggaggcggcgctcgcttcgtcggcgttcccggccggcttgcgtttccgcgaagtcgcccggccctggagcgattacgaccagcgcgtcgtggtggtgcccaaccaggcgggggccgcggtcccggtcccgctcccgccggcctgggcggagggcgagggcagcgatggggactaccggttcgtcgcggtggatggtggcgcgatggacaacgagccgttcgaacttgcccgtaccgagctggcgggcacgctcggccgcaatccacgcgaagggaaccgggtcaaccgcatcgtgatcatgctcgatccgtttcccgaggccgaggcgccgggacccgcggaagccgcgagcacgaatctcgtcgaggcgatggcctcgctgtttggtgcgtggaaacagcaggcacggttcaagccggaggaagtggcgctcgccctggattcgaccgtgtacagccgcttcatgatcgcgcccagccggccgtgcatggagggcgggccacggtggatcggtgggcgagcgctcgccgcgggtgcgctgggtggcttctcggggttcctggcggaggcatacaggcaccacgatttcctcctgggacgccgcaactgccaacgcttcctcgccgagcgcctgttgatccccgcggacaatccgatcttcgccggctggatcgacgatccctccctgcagggctacatccgcgagatcgatggcgtgcgttacgccccggtcatcccgctggtgggcggctgccagggcttgcgcgagccgttgcccacgtggccgcgtggtgcattcgacctggactcgctcatgccgctggtcgagcgccgcatgcagcgcctgtattcggcggctaccgcgacgctcggtggccgcttcgccacctggctggcgtggcgcttctacctgcgccgcaagctcctcgacctggtctcaagccgtatccgtagcgcattgagggacttcggcctttggtga

SEQ ID NO: 620 - protein, 569 aa, Unknown
  Obtained from environmental sample
MADNELPLARPRETPPCRPGTFELGLALAGAVSGGAYAAGVLDFFYEALEHWYEAREAGAPVPNHDVLLRIISGASAGSINGVLSGIALPYRFPHVHSGPAPEGATGNPFYDAWVKRIDVRELLGNEDLADPTQPVASLLDATCLDTIAKDMLGFSAAPATRPYVANPLKCVFTVTNLRGVPYVVQFKGNPEIPGHGMMAHADWLRFAVDTGQGDRDGEWMFPDERLVSGPSHARTPAWQGFMEAALASSAFPAGLRFREVARPWSDYDQRVVVVPNQAGAAVPVPLPPAWAEGEGSDGDYRFVAVDGGAMDNEPFELARTELAGTLGRNPREGNRVNRIVIMLDPFPEAEAPGPAEAASTNLVEAMASLFGAWKQQARFKPEEVALALDSTVYSRFMIAPSRPCMEGGPRWIGGRALAAGALGGFSGFLAEAYRHHDFLLGRRNCQRFLAERLLIPADNPIFAGWIDDPSLQGYIREIDGVRYAPVIPLVGGCQGLREPLPTWPRGAFDLDSLMPLVERRMQRLYSAATATLGGRFATWLAWRFYLRRKLLDLVSSRIRSALRDFGLW

SEQ ID NO: 621 - DNA, 1293 bp, Unknown
  Obtained from environmental sample
atgttgacacggagagaattgattgcagcgactgccctggggctcgccgctagtacgaaacttgttgctgctgccacgagtaaaaccagggatgatttcctttggggggtggccacggcgccacaccaaatcgagggcaacaacctgaatgccgacctgtggctggccgaacaggtgaagccgacgatctttcacgagccttcgggcgatgcctgtgacagctaccatcgctatgaggaggatatcgagctggtggcggcgctcggcttcaattgttaccgcttcggcatcgaatgggcccgcatcgagcccgttcccggccagttttcgatcgccgagttggaccactaccggcgcatgctggaggcttgccacgcgcacgggctgacgccggtggtcacgtacaaccatttcaccgcgccgcgctggtttgcagccaagggcggtttcacccagccggaggctgccggcctgttcgcccgctatgccggcaaggccacggagcacctaggtgacctgatcggcatggcgctgacgttcaacgaggccaatatccggcgcattgtcagcttgctcctgggcagtcccgaggcgctccagctgatcgacgcgatgtttgccgagtgcgcgcgcctcagcggatccgaccggttctggtcgatggtcttttcgccttacggtgaggccgagccaataatggtggacgcccatgccaaggccagcgcggcgatcaaggccggccccggggactttcccgtcgggctcacgctgtcgatgcaggacgtgcaaggcatcggcgagggcaaccaggccgaggctttgatccaggcactttacggcccatggctcgaggtagcggccgcgtccgatttcgttggcgtgcagacctacacccggatacgcgtgggaccggaaggccgtatcccgcccgacgagggtgccgaacggaccgatacgggcttcgagttctacccggcggcgttgggcggcgcgatccgatttgcgcacgagcgcatcggacgccccatctacgtgaccgagaacggcgtggccgcgaatgacgacagccggcgcattgtctacatagacggcgcattgaaagcgatgaaggactgcatcgacgagggcctggacgtacgtggctacatgcactggtcgctgttggacaacttcgaatggttcgaaggctatgccaagagatacggcctggtggaggttgatcgcgaaaccttcgagcgccgtccgaagccaagcgcccggcacctgggtgcgattgcccgctcgggcctctaa

SEQ ID NO: 622 - protein, 430 aa, Unknown
  Obtained from environmental sample
  SIGNAL (1)...(23)
  DOMAIN (26)...(430): Glycosyl hydrolase family 1
MLTRRELIAATALGLAASTKLVAAATSKTRDDFLWGVATAPHQIEGNNLNADLWLAEQVKPTIFHEPSGDACDSYHRYEEDIELVAALGFNCYRFGIEWARIEPVPGQFSIAELDHYRRMLEACHAHGLTPVVTYNHFTAPRWFAAKGGFTQPEAAGLFARYAGKATEHLGDLIGMALTFNEANIRRIVSLLLGSPEALQLIDAMFAECARLSGSDRFWSMVFSPYGEAEPIMVDAHAKASAAIKAGPGDFPVGLTLSMQDVQGIGEGNQAEALIQALYGPWLEVAAASDFVGVQTYTRIRVGPEGRIPPDEGAERTDTGFEFYPAALGGAIRFAHERIGRPIYVTENGVAANDDSRRIVYIDGALKAMKDCIDEGLDVRGYMHWSLLDNFEWFEGYAKRYGLVEVDRETFERRPKPSARHLGAIARSGL

SEQ ID NO: 623 - DNA, 1017 bp, Unknown
  Obtained from environmental sample
atgaaggaaacaacgcttagaaaaagcgaggtaataaaagtttttcgaacggaaggtagacaacaaaatgtgagcctaatgctaaaaactttaataaggaaaaaacagttgccctcaattgggccgttcaaccgtatctgctgccgaaaaccgatgaagctttccctacccctcctcatgctcctcccggcattgctggcaggctgctcgccgctgcgggcgttcaacagcctggtgcccaaggacggcggcgtggagcaggcggagcgcggcgccgccttcggaccccacgaacgccagcggctggacgtctatcgccctgcgcgggccggtgcagcgccactccccatcatcgtgttcatctacggcgggtcatggcaaaccgggacgcgcgaaggctacggctttgccgcccgggcgctggcggcgcgcggtttcgtcgtggcggtgccggactatcggctggtgccggaagtgcgctttcccgcctttctcgaagacggcgcggcggcggtgcgctgggtgcgcgccaatgcagagcgcctcggcgccgatccgtcgcgcatcgtcatcgtcggccattcggcgggcgcctacaacgccgccatgctcgcgcttgatccgcgctggctcggcgcggacagggcgtcgatcaagggtctggtggggcttgccgggccctatgacttcctgccgctcagcggtccggtcaccacggccgctttcggcgaggcgcgggtcccggccgaaacgcagccgatcaatttcgcctcggccggcgacccgcccgcgctgctgctccacggcggggcggacaccaccgtctacccgcgcaacagccagcggctggcggagcgcctgcgcgcctccgctgtagatgcgcgggtgaaggtctacccggagctcggccatgtcggcatcgttctcgccctcagccgcccattgcgcggccgtgctccggtgttggacgacatcgcagccttcgctagcgaagtgacggcagcgcgcccccgctaa

SEQ ID NO: 624 - protein, 338 aa, Unknown
  Obtained from environmental sample
  SIGNAL (1)...(74)
MKETTLRKSEVIKVFRTEGRQQNVSLMLKTLIRKKQLPSIGPFNRICCRKPMKLSLPLLMLLPALLAGCSPLRAFNSLVPKDGGVEQAERGAAFGPHERQRLDVYRPARAGAAPLPIIVFIYGGSWQTGTREGYGFAARALAARGFVVAVPDYRLVPEVRFPAFLEDGAAAVRWVRANAERLGADPSRIVIVGHSAGAYNAAMLALDPRWLGADRASIKGLVGLAGPYDFLPLSGPVTTAAFGEARVPAETQPINFASAGDPPALLLHGGADTTVYPRNSQRLAERLRASAVDARVKVYPELGHVGIVLALSRPLRGRAPVLDDIAAFASEVTAARPR

SEQ ID NO: 625 - DNA, 957 bp, Unknown
  Obtained from environmental sample
atgaaatgtgatgcagtatttgaaggtggcggtgtcaaaggtattgccttcgtcggagctgttcaggaagcggaaaagcagggctatgtgtttgaacgggtagccgggacatcggcagggtctattgttgctgcacttattgcagccggatattccggagacgagttggaaacacatatgaaagagctttcatttgcatcttttcttgatttaaacagtttggggcgtattcctttcgtcggcaaaagtttaaacatcatgttcagaaacggcgtttattcaggcaagcgactcgaagcgtgggttgatgctaaactgaagcgaaaagggatacgttttttcggagatttaccggataataaactgaccgttattgcctcagatattacgaacgggcgtattatgcgcataccggatgatctgcaggaatacgggctggacgtcagtacatttcctgttgccaaagcagtgctcatgagttgtacgattccatatttttttcagcctgttattttaaaatataacggtaagaaagcgtacattgtggatggtggcctgcttagtaattttccggtttggctgtttgatacgacaaatacgacgccccgctggccaacgttcggatttcggttacgaggggcagacagcgaagacccggcacacattgcaggacccgttacgatgtttcgggctattgtatcgacgatgctggaagcacatgaccggcgctatataaagaaaaaagatgcccaacggacgatatttatcccggttgataatattaaagcaacggattttgatattagtaaagaagagcaacggcaactgattgaattaggcagagcagaagctgaggaattttttgatcagtggaatttttcaagacatattcatcagttccgtcgcatgccgaaatttattcagacaagaacgcaggcagcaaaaaatgaaggctga

SEQ ID NO: 626 - protein, 318 aa, Unknown
  Obtained from environmental sample
  DOMAIN (5)...(196): Patatin-like phospholipase
MKCDAVFEGGGVKGIAFVGAVQEAEKQGYVFERVAGTSAGSIVAALIAAGYSGDELETHMKELSFASFLDLNSLGRIPFVGKSLNIMFRNGVYSGKRLEAWVDAKLKRKGIRFFGDLPDNKLTVIASDITNGRIMRIPDDLQEYGLDVSTFPVAKAVLMSCTIPYFFQPVILKYNGKKAYIVDGGLLSNFPVWLFDTTNTTPRWPTFGFRLRGADSEDPAHIAGPVTMFRAIVSTMLEAHDRRYIKKKDAQRTIFIPVDNIKATDFDISKEEQRQLIELGRAEAEEFFDQWNFSRHIHQFRRMPKFIQTRTQAAKNEG

SEQ ID NO: 627 - DNA, 1434 bp, Unknown
  Obtained from environmental sample
atgaaaaagaaaatatgtacattggctcttgtatcagcaataacttctggagttgtgacgattccaacggtagcatctgcttgcagaataggcgaagaagtaatgaaacaggagaaacaggataatcaagagcacaaacgtgtgaaaagatggtctgcggagcatccgcatcattctaatgaaagcacgcacttatggattgctcgaaatgcgattcaaattatgagtcgtaatcaagataacacggtccaaaacaatgaattacagttcttaaatattcctgaatataaggagttatttgaaagaggactttatgatgctgattaccttgatgaatttaacgatggcggtacaggtacaatcggcattgatgggctaattaaaggagggtggaaatctcatttttatgatccagatacgaaaaagaattataaaggagaagaagctccaacagcccttacgcaaggagataaatattttaaattagcaggagactattttaagaaagaggatttgaaacaagctttctactatttaggtgttgcgactcactatttcacagatgctactcagccaatgcatgctgctaattttacagctgtcgacatgagtgcgataaagtttcatagcgcttttgaaaattatgtaacgacaattcagacgccatttgaagtgaaggatgataaaggaacctataatttggttgattctaatgatccgaagcagtggatacatgaaacagcgaaactcgcaaaagcggaaattatgaatattactaatgatactattaaatctcaatataataaagggaacaatgatctttggcaacaaggagttatgccagctgttcagagaagtctggaaacagcacaaaggaacacggcaggatttattcatttatggtttaaaacatatgttggcaaaactgctgctgaagatattgaaaatacacaagtaaaagattctaacggagaagcaatacaagaaaataaaaaatactacgttgtaccgagtgagtttttaaatagaggtttgacctttgaggtatatgctgcaaatgactacgcactattagctaatcacgtagatgataataaagttcatggtacacctgttcagtttgtttttgataaagacaataacggaattcttcatcggggagaaagtgcactgatgaaaatgacgcaatctaactatgctgattatgtatttctcaattactctaatatgacaaattgggtacatcttgcgaaacgaaaaacaaatacttcacagtttaaagtgtatccaaatccggataactcatctgaatatttcttatatacagatggatacccggtaaattatcaagaaaatggtaacggaaagagctggattgtgttaggaaagaaaacggataaaccaaaagcgtggaaatttatacaggcggaataa

SEQ ID NO: 628 - protein, 477 aa, Unknown
  Obtained from environmental sample
  SIGNAL (1)...(27)
  DOMAIN (1)...(307): Zinc dependent phospholipase C
MKKKICTLALVSAITSGVVTIPTVASACRIGEEVMKQEKQDNQEHKRVKRWSAEHPHHSNESTHLWIARNAIQIMSRNQDNTVQNNELQFLNIPEYKELFERGLYDADYLDEFNDGGTGTIGIDGLIKGGWKSHFYDPDTKKNYKGEEAPTALTQGDKYFKLAGDYFKKEDLKQAFYYLGVATHYFTDATQPMHAANFTAVDMSAIKFHSAFENYVTTIQTPFEVKDDKGTYNLVDSNDPKQWIHETAKLAKAEIMNITNDTIKSQYNKGNNDLWQQGVMPAVQRSLETAQRNTAGFIHLWFKTYVGKTAAEDIENTQVKDSNGEAIQENKKYYVVPSEFLNRGLTFEVYAANDYALLANHVDDNKVHGTPVQFVFDKDNNGILHRGESALMKMTQSNYADYVFLNYSNMTNWVHLAKRKTNTSQFKVYPNPDNSSEYFLYTDGYPVNYQENGNGKSWIVLGKKTDKPKAWKFIQAE

SEQ ID NO: 629 - DNA, 1281 bp, Unknown
  Obtained from environmental sample
atgaacacgactcgtgccctcaggcatgcggctgccgcatgcgcgttcctgtccctcggctccgcggcgctgcccgcgctggccgccaacaacgctcccgtcatcctcgtccacggtttcgccggcttcggccgcagcgagctgctgggctacaagtactggggcggcctcaacgacctgcaggagcagctgaaggcccagtacgcggaccaggcggtggccaccgcggtggtcggcccgttcagctcgaactgggatcgcgccgtcgaactgttctaccagatcaagggcggctgcgtggactacggcgcgctgcatgcggcggccaacggccacctcgagagccccgagagctactttcacaatggccgcacctgctaccccgggctgtatccggcctgggacggcagccatcccgtgcacctgatctcgcacagcatgggcggccagacctcgcgcatgctggtgcagatgctcgcggccaacggcgcgccggccaatccgtcgctgttcccttacgccgtcgacgcgagctgggtcaagagcgtgacgacgatcgccacgcccaacgacggcaccacgctggcgtaccgcatcacggactgggtgccgttcgtgcagcagctcgtcaccggcatcgccaacttcacgggcgcgaccggcggcaacctggtctacgacttcaagctcgaccagtggggtgtgggcgcgcaggcgccgggcgagagcttcaccgcgtacgtgaaccgcgtcacgggcagcccgctgtggaattccggcgtgaaggacctgtcgccgtacgacctctcgcctgctggcgcgatggccgagaacgactgggtcaaggaccagcccaacgtcacctacttctcttgggtgacgaactcgagctacagcgggctgctcaccggctggtcgtaccccgacctcgacaccaatccgttgatcgcggcgttcgccggccccggcttcatgggcaactactaccgcgattcgcgcccgatgccgccggtcgacgacagcacctggttccccagcgacgccgtcgtcaacacgatcgcgcaggaggtgcccacctgggcgatgaacgcggcgggcacggtctacaagcgcccggtggtgctgcgcgacatcagcaacggcggcgcgccgcaggccggcgcgtggaactacaagggccggctcgacggcttcgaccacctcgacgcagtgggctggacgctgttctgggacagcctgtcctggtacaaggcgcgcgtcgacgagctgcgcgcgctctga

SEQ ID NO: 630 - protein, 426 aa, Unknown
  Obtained from environmental sample
  SIGNAL (1)...(28)
MNTTRALRHAAAACAFLSLGSAALPALAANNAPVILVHGFAGFGRSELLGYKYWGGLNDLQEQLKAQYADQAVATAVVGPFSSNWDRAVELFYQIKGGCVDYGALHAAANGHLESPESYFHNGRTCYPGLYPAWDGSHPVHLISHSMGGQTSRMLVQMLAANGAPANPSLFPYAVDASWVKSVTTIATPNDGTTLAYRITDWVPFVQQLVTGIANFTGATGGNLVYDFKLDQWGVGAQAPGESFTAYVNRVTGSPLWNSGVKDLSPYDLSPAGAMAENDWVKDQPNVTYFSWVTNSSYSGLLTGWSYPDLDTNPLIAAFAGPGFMGNYYRDSRPMPPVDDSTWFPSDAVVNTIAQEVPTWAMNAAGTVYKRPVVLRDISNGGAPQAGAWNYKGRLDGFDHLDAVGWTLFWDSLSWYKARVDELRAL

SEQ ID NO: 631 - DNA, 633 bp, Unknown
  Obtained from environmental sample
atgaacatcagattgacttctgttttagccctgtcgctgactctgttgctgggacaggtcagcggaaaggaccgggaaacgaagacgatccttgttctgggcgacagtctggcggcaggctacggcgtttcgcctgaacaggcttttccgggccttctgcaggaaaagctgcgtcagcgaggacttgccttcagggtcatcaacgctggaatcagcggagatacttcatcgtccggtttgagccggatcgaatggtatttgcgcgatccgatcgacatcctcattctggaactcggagcaaatgacggattgcgcggaatctctccggaagccaccgagtccaatctggctgaaacgatcaaacgtttccgcacggcgaacccttccggagaagcgatcctcgccgggatgctggtgcctccaaacatgggcccgcaatactctcgccagtttcaagaaatatttccccgcctggccgaaaggacgggcgctcgtttgatccccttcctgctggagggagtggcgggagatccccggttaaatctgcctgacgggattcatccgactcctgagggccatcggatcgttgccgaaaatgtctggagggttctcgaaccgatccttcaggaatga

SEQ ID NO: 632 - protein, 210 aa, Unknown
  Obtained from environmental sample
  SIGNAL (1)...(22)
  DOMAIN (30)...(200): GDSL-like Lipase/Acylhydrolase
MNIRLTSVLALSLTLLLGQVSGKDRETKTILVLGDSLAAGYGVSPEQAFPGLLQEKLRQRGLAFRVINAGISGDTSSSGLSRIEWYLRDPIDILILELGANDGLRGISPEATESNLAETIKRFRTANPSGEAILAGMLVPPNMGPQYSRQFQEIFPRLAERTGARLIPFLLEGVAGDPRLNLPDGIHPTPEGHRIVAENVWRVLEPILQE

SEQ ID NO: 633 - DNA, 729 bp, Unknown
  Obtained from environmental sample
atgagttcagctgtttctgatattgcctccctgaaagcccggctgaaggtcacctggaggactggtgacttcggccaaatcgccaagtcctatgagtccggtgctgcagagtttatcgaacgacttaatctcaagtccggtacgcggctactcgatgtagcatgcggtacgggtaatttagctctcccggcagcccgcgctggcgccatcgtgagcggtgttgacctagctgacaacttgctcgagcaagcccgctcacgcgccgaggctgaagggcttaaagcaaagtttgatgaaggcgatgccgagcagttgccttacgaagatgcgagctttgacgttgttgtcagcatgtttggatctatgttcgccccgcgccccgaactggtttccatcgagttacttcgcgtctgccgtcctggtgggagaatagctttggctaactggacctccgcagggttcatcggccaaatgttcaaaacgatctcgacgcatgtgccgccgccacctaacatgccatcgccgctgaagtggggagacgaggtgaccgtgcgcgagaggttgggcggcggtgtttccgacataagtatgacccgccgattgatgccatttaccttcccattcgggccaaaagaggttgtagagttctttcgcgtttactatggaccgacaaacaaagcattcgaggcagttgctgctgacccgaacaagcaggcagcaatgcgcgta

SEQ ID NO: 634 - protein, 243 aa, Unknown
  Obtained from environmental sample
  DOMAIN (12)...(200): ubiE/COQ5 methyltransferase family
MSSAVSDIASLKARLKVTWRTGDFGQIAKSYESGAAEFIERLNLKSGTRLLDVACGTGNLALPAARAGAIVSGVDLADNLLEQARSRAEAEGLKAKFDEGDAEQLPYEDASFDVVVSMFGSMFAPRPELVSIELLRVCRPGGRIALANWTSAGFIGQMFKTISTHVPPPPNMPSPLKWGDEVTVRERLGGGVSDISMTRRLMPFTFPFGPKEVVEFFRVYYGPTNKAFEAVAADPNKQAAMRV

SEQ ID NO: 635 - DNA, 747 bp, Unknown
  Obtained from environmental sample
atgaaggttaaccttgtgctttcgggcggggcttctcggggcatagcccatattggtgtgataaaggctttggaagagcttggctttgagataagagccataagcggggtaagtgccggcgcccttgtgggagctttctactgcgatggctacacaccagaggagatgctaagggttgtaaaatcaaaggagtggctaaagtatttgaggccagccattccaaggcttggctttatatctttaaaagaggcggaaaagtacttgaataagatgctatccataaggcgcattgaagaggcaaagaaaaagctattcattggggccttggacataaagagtggaaagaccttctactttgatagtggagaccttgtgcctatacttttgggtagctgcgccctgccgggcatctttgaacctataaggtataaggaatatcttcttatagatggtggtattaccaacaaccttcctgcagagcctttgctttccatggatggcatgcttgtaggcgtggatgtaaacccaagcgaacaggtggagaagataaggaatatatttcacctacttgtgagaagttttctcttggcggtgaggtctaacgtggataagaggaaagagctttgccatgtggtaatagagccagacctttttaaatactcacccctcagccttctaaaggctgatgaaatatataggcttggctatgaaaaaaccatgcaggtgctaaggccatatgtccaataa

SEQ ID NO: 636 - protein, 248 aa, Unknown
  Obtained from environmental sample
  DOMAIN (5)...(163): Patatin-like phospholipase
MKVNLVLSGGASRGIAHIGVIKALEELGFEIRAISGVSAGALVGAFYCDGYTPEEMLRVVKSKEWLKYLRPAIPRLGFISLKEAEKYLNKMLSIRRIEEAKKKLFIGALDIKSGKTFYFDSGDLVPILLGSCALPGIFEPIRYKEYLLIDGGITNNLPAEPLLSMDGMLVGVDVNPSEQVEKIRNIFHLLVRSFLLAVRSNVDKRKELCHVVIEPDLFKYSPLSLLKADEIYRLGYEKTMQVLRPYVQ

SEQ ID NO: 637 - DNA, 915 bp, Unknown; identical to SEQ ID NO: 113
  Obtained from environmental sample

SEQ ID NO: 638 - protein, 304 aa, Unknown; identical to SEQ ID NO: 114
  Obtained from environmental sample
  SIGNAL (1)...(25)
  DOMAIN (44)...(280): alpha/beta hydrolase fold

SEQ ID NO: 639 - DNA, 1422 bp, Unknown
  Obtained from environmental sample
atgatcgttctattcgttcacggatggagtgttcaacacaccgacagctacggcgaactgccggcctggctggcccgccaaaacgggcccgacggccagccgcttacgattgaagatgtgttcctcggcaagtacgtcagcttcgatgacaccgtgagcgtcgatgacattgcgcgcgcgctggatttcgccgtccgcgacaagctgggaagccggctcaagaagggggaacgcttcgccgccatcacgcattccaccggcgggcccgtggtgcgggcctggatggacctgtattggaagaagaagctcgaccgttgcccgctcagtcacctcatcatgctggctcccgccaaccatggctcggccttggcccagttgggcaagggccgtctcagtcgcatcaagaccttcttccagggagcggaacccggccagcgcgtgctcgattggctggagcttggcagtgaaggttcatgggccctcaataccagctggctggattatgactgcgttcccgctggcgtatttcccttcgtgctcaccggtcaacgcattgatcgcaagctctacgatgccctgaactcctatacgggcgagccgggctcggacggtgtcgtgcgcgtcgccgccgcgaatatcaactacggcttgctgcgtctggtgcaggacgagacggacctcaaagtcgaacgactccgccgcacggctcggaccgcttggggcgtcttgcccggcctttcccattccggcgacgagatggggatcattcgcagcgtgacgctggagaacgccgaaactcatccgacggcccaatgggtgctgcgctgtctcggcgtcagcagcatggcctcgtacaatcggctgatggccgagctggacgcactcactgcgaagacgcaagaggaagaacacgaagaaaaggtgcgcagcttgttcaaacggcggacgtatcccaacccgcgtcatggcatgattgtcttccgcctggtggacgatcgtggcgaatacctctccgactacgacctctacttcaccgccggtcccgactacgacgaagacgagttgccggaagggtttttccaggatcgtcagcgtaaccaacgcaatcggggcaagctgacctactatctgaattatgacgtgctcgagtctggtttggaatccaagggactggaaggcaagttcgggttcaaggtcaccgcgaggcccgatgaggaacccggcaagcgtaaactggccttctatcgcacgctcaacttcgaaggcaccgcccagcaggtgaagaaattcctgctgcccaacgaaaccctgatggtcgaaatccagctccagcgccaggtggacgccgccgtgttccaggtcgagaaggaactcgccccgagcccgatcgacgccacgcccacgggccggctggtggattga

SEQ ID NO: 640 - protein, 473 aa, Unknown
  Obtained from environmental sample
MIVLFVHGWSVQHTDSYGELPAWLARQNGPDGQPLTIEDVFLGKYVSFDDTVSVDDIARALDFAVRDKLGSRLKKGERFAAITHSTGGPVVRAWMDLYWKKKLDRCPLSHLIMLAPANHGSALAQLGKGRLSRIKTFFQGAEPGQRVLDWLELGSEGSWALNTSWLDYDCVPAGVFPFVLTGQRIDRKLYDALNSYTGEPGSDGVVRVAAANINYGLLRLVQDETDLKVERLRRTARTAWGVLPGLSHSGDEMGIIRSVTLENAETHPTAQWVLRCLGVSSMASYNRLMAELDALTAKTQEEEHEEKVRSLFKRRTYPNPRHGMIVFRLVDDRGEYLSDYDLYFTAGPDYDEDELPEGFFQDRQRNQRNRGKLTYYLNYDVLESGLESKGLEGKFGFKVTARPDEEPGKRKLAFYRTLNFEGTAQQVKKFLLPNETLMVEIQLQRQVDAAVFQVEKELAPSPIDATPTGRLVD

SEQ ID NO: 641 - DNA, 1932 bp, Unknown
  Obtained from environmental sample
atgcgcaggctctccctactcatccccttggcgggatgcatcctgtccatcgtcagtgaacgtgccatagcagcaccctcgccgtattccaccatgatcgtgttcggcgacagcctgagcgactcggggcattttccaggggtcggcacaggcatgcgcttcaccaaccgcaccgggccgacgtacagggattaccggggggaggaatatgctgcagtaacgcccacgcggctgggcacccaactggggatcgccccggcagacctgcgcccgtccacttcgccgggcaactctcttgcaggggagcccgacggcaacaactgggcggttggcggctatcgcacagaccagattctcaattccatcaagaccgagtcaaaggtcgccatcccggatgactggtccttcgtcggcggctacgtcctgcgcagcaagcctggttaccttgtgcagaacagcttcacggctgaccccaaggcgttgtatttcatttcaggcggcggtaatgactttctccaaggcaaggtcaccaaccccgccgaggcaggccaagccgcacaaaggctggcggcaagcgcccacaccctgcaacaggcaggggcacgctacatcatggtctggctgctgcccgatctgggcctgacgccagccgtttacggtacacccacccaggctggcaccagcgccctgagcgccctgttcaatcatgagctaacccagcaactggcgcagatagacgccgaagtgattcccctcaatatcccgctgctgctgcgtgaagccatcgccgaccccgcccgttatggcctggcactggggcaggaccttgtcgcgacctgtttcaatggcgaagagtgtacggaaaacccgcagtacggcctcaacagcgcaactcccaacccggccaaactgctgttcaacgactcggtacaccccaccgagacagggcaacagctgattgccgactatgcctactcattgctggccgtgccgtgggagctgaccttgttacccgttatggcccaaggctcgctaaacgcccatcaagaccagttgcgcaaccaatgggctggcgacgacggtcaatggcaagccataggccagtggcgaaccctgctcgccggtggcggtcaacgcctggaaatcgacaagcagaccacggccgtgaaggcagatggcaaaggctataacctcaatatcggcaccagctacaggctggatgacaactggcgatttggcattgccggcgggttttaccggcaacgcctggaaaccggggccaataaatcggactacaagctcagcagctatctgggtagcgtgtttgcccaataccagcacaatcactggtggggggatgcggcactgacgttgggcaggctggattacgacagcctgaagcgaaaattcgcgcttggggtgggtagtgagatggagcaaggccaggctgacggccatttgcgagcattgagtacacgcctgggttatgaaatcgcacaggcatctgacctgtggcagctctccccctttatcagcgccgattactcgcgggtggaagttaaccgctatgaagaaaagggccggcgctccactgcattgaactacgaagagcagacacttgtttcaaatcgcctgggcgcgggtttgctcgccagttaccaggccaccccacaaacgctgttatttggcgaggccgcccatgaacatgagttccagagcgatacccagcgcctgaacatcgcactcaacagcctgcccgacaaccgcttcaagctcgagggctatacaccgccgagcaaccttgcccgtgtaagcctgggggtcagccacagattgactgccgatcttgtgctgcgggcggcttataacgcgagaaagagtgatggggtaacgcaacagggcgccactatcggggtgagcctgaacttctga

SEQ ID NO: 642 - protein, 643 aa, Unknown
  Obtained from environmental sample
  SIGNAL (1)...(24)
  DOMAIN (346)...(643): Autotransporter beta-domain
  DOMAIN (32)...(324): GDSL-like Lipase/Acylhydrolase
MRRLSLLIPLAGCILSIVSERAIAAPSPYSTMIVFGDSLSDSGHFPGVGTGMRFTNRTGPTYRDYRGEEYAAVTPTRLGTQLGIAPADLRPSTSPGNSLAGEPDGNNWAVGGYRTDQILNSIKTESKVAIPDDWSFVGGYVLRSKPGYLVQNSFTADPKALYFISGGGNDFLQGKVTNPAEAGQAAQRLAASAHTLQQAGARYIMVWLLPDLGLTPAVYGTPTQAGTSALSALFNHELTQQLAQIDAEVIPLNIPLLLREAIADPARYGLALGQDLVATCFNGEECTENPQYGLNSATPNPAKLLFNDSVHPTETGQQLIADYAYSLLAVPWELTLLPVMAQGSLNAHQDQLRNQWAGDDGQWQAIGQWRTLLAGGGQRLEIDKQTTAVKADGKGYNLNIGTSYRLDDNWRFGIAGGFYRQRLETGANKSDYKLSSYLGSVFAQYQHNHWWGDAALTLGRLDYDSLKRKFALGVGSEMEQGQADGHLRALSTRLGYEIAQASDLWQLSPFISADYSRVEVNRYEEKGRRSTALNYEEQTLVSNRLGAGLLASYQATPQTLLFGEAAHEHEFQSDTQRLNIALNSLPDNRFKLEGYTPPSNLARVSLGVSHRLTADLVLRAAYNARKSDGVTQQGATIGVSLNF

SEQ ID NO: 643 - DNA, 558 bp, Unknown
  Obtained from environmental sample
atgaaacgcagaaccttcctgaagagaatcgttgcctctctcctggtggcgctgatgatctgcggcagtaccgttgcctacgcttcagccgctgacaaccacacctataccaccgctcccgaaatctaccagttgatccgcgacggctacaaccagggtgagaaaggccccatctccatcgtcaagggcactctgaaatccggctggagttcaaagaccgtctaccttgtcaccctgtccggtaccgagatcgtgttcaaccagaccaccgaaggcctgaccgatctgctgtccggtttcaatctgaaaaacccctactataccaacgtggtcaatgtaatcaaaaacaacgtgcccaagaacgccaatcttgtactggccgggcacagtctgggcggcatgattgcccagcaggtggctgccgattccaccatcaagtcccgctacaatgtcctcaataccgtttgcttcggctctccgctgctggctgccggtttccgggaaggcaccgttcgccggctgggtgacgtctccgatccggtcccctatctgtcctga

SEQ ID NO: 644 - protein, 185 aa, Unknown
  Obtained from environmental sample
  SIGNAL (1)...(28)
MKRRTFLKRIVASLLVALMICGSTVAYASAADNHTYTTAPEIYQLIRDGYNQGEKGPISIVKGTLKSGWSSKTVYLVTLSGTEIVFNQTTEGLTDLLSGFNLKNPYYTNVVNVIKNNVPKNANLVLAGHSLGGMIAQQVAADSTIKSRYNVLNTVCFGSPLLAAGFREGTVRRLGDVSDPVPYLS

SEQ ID NO: 645 - DNA, 825 bp, Unknown
  Obtained from environmental sample
atgaaaaaggaaacgatcatccattcctttgatggaactgaactgtatatgcaaaaaaatacgcctcaaaatccgcatgcggtaatggttattgtccatggacttggcgagcactcgggccggtatgagtatgtaacagaaaaattgaacggatatggctatgccgtctaccgttttgacaaccgcggccatgggaaatccggcggtgcgcgaggctatgtggaggatgcgtctaaattcgttcatgatgcacatgaagtcgtaaaggcggctcgtcatgactatccgaaactgccgattttcatgctaggccacagtatgggcggatttattgcggcgtcttatggtgttcaatacaaaaatacattggccggccaaattttctccgggcctgtcattctggaactgccggcattcgatgagttaaaaaagctggatatggaaaaagaggcgctgacgcggattccgaacggactggctcacctgatctgccgcagcccggctgtcgtccaggattacgaaaatgacccatacaatttaaaagaattcaccgcaaaactgctgacgactgtttttcacgagggtgtacaacatttgcttcaaaagctccctcagtacacatatccttgttatattttacacggcgaggacgatcaaatcgttcctgccgattcaggaagatacttatacgatcacattgcctctgaagataaatctatttgtgtaatcccacacctctatcatgaaatactgaatgaggaaaaagaaaaagacgagcttttacaagaaatattcgaatggatagaagaacgaatacaaaaataa

SEQ ID NO: 646 - protein, 274 aa, Unknown
  Obtained from environmental sample
  DOMAIN (54)...(274): alpha/beta hydrolase fold
MKKETIIHSFDGTELYMQKNTPQNPHAVMVIVHGLGEHSGRYEYVTEKLNGYGYAVYRFDNRGHGKSGGARGYVEDASKFVHDAHEVVKAARHDYPKLPIFMLGHSMGGFIAASYGVQYKNTLAGQIFSGPVILELPAFDELKKLDMEKEALTRIPNGLAHLICRSPAVVQDYENDPYNLKEFTAKLLTTVFHEGVQHLLQKLPQYTYPCYILHGEDDQIVPADSGRYLYDHIASEDKSICVIPHLYHEILNEEKEKDELLQEIFEWIEERIQK

SEQ ID NO: 647 - DNA, 1566 bp, Unknown
  Obtained from environmental sample
atgagatttgaccgaaaaggcgcacgtctgggtagcccccttttgcttagcgcgatgattggcatggcactcgccggatgcggtggcgataatgaagatcgtaaccgtgttctgacagaccggggtgaagtgcttggtaccgaagccgcaggcatgcaccaatatctgggcattccatacgcagcgccgccgaccggtacgcgtcgctggaaagcgccagagccgcccgcaccttggagcacgacgcgcgatgccagcaagttcggtagcggctgtccgcaaaccggaggcgcctttggcacagccagtaccaacgaagactgcctgtatctgaatgtctttactcccaaaggcaatgggcccttccccgtcatggtctgggtgcacggcggtgcgttcgtatccgggtccggcgacagttacgacgcgagcaaactcgtttcgcaaggcgtcgccgtcgtcacaatcaattaccgcctcggttatttcggatttctcgcccatccttcgctcagcgcggagcaaggaggatcgtccggcaactatggcttgatggatcagcaggctgcgctgcgttgggtcaagaacaacatcgcgcagttccgcggcgatccgaataacgtaacggttttcggagaatcggccggcggactcagcgttcaatcccaagtagcttcgccactggctgccggtctgttcaacaaggcaatcgtgcagagcggcgcctatgcgcttgacctgccttcacttgcacaagcgcaggctggaggtacggcggtggccacggctgccggttgcacggaccagagtgcaagctgcctgcgcgcattgaccgttgagcagatcctgcaacgtcagaccggtgccaatgtcgtgccgactgtcgacaacagggtccttccgctgaccttgcgcgcagcgttcaccacaggcagctttaacaaggtgccggtcattgagggtaacaatgcggacgagtacagcctgctctcggccgctcgcatggatctcgtgccatcagttggtccggtgaccgcggcaaattatcaggcacgtgtcacaagcctgatcgccacctcgggcaagacgtttgaacaggtaaatgcgcaatatcctttgacagcatatgcaactccggttgaagcctatgacgcaattgcgaccgatctggtgttcgcatgctccggtcgcacctcagcaagactcaagagcgcaagcggcgtcaatgtctacgcttatgagttcaatgatccgaatgcgccgatgatctatctgccgccggcgacgcgtccgcgctggggtgcataccatgcagccgagatccagtatctgttcccgaccactcgccccaatgttacctacaccccggctcagcaatccctgtccaaccaaatggtcgcctactggaccgcatttgcgaagagcagcaatccaaacggtaccggacccacttggccccaatacaccagtgcgaacgacacctacctttcacttgaaccgggaacctcgcgcacgctgactaactttgcggaaaaacacaagtgcacgttctggtccggctcctga

SEQ ID NO: 648 - protein, 521 aa, Unknown
  Obtained from environmental sample
  SIGNAL (1)...(25)
  DOMAIN (7)...(518): Carboxylesterase
MRFDRKGARLGSPLLLSAMIGMALAGCGGDNEDRNRVLTDRGEVLGTEAAGMHQYLGIPYAAPPTGTRRWKAPEPPAPWSTTRDASKFGSGCPQTGGAFGTASTNEDCLYLNVFTPKGNGPFPVMVWVHGGAFVSGSGDSYDASKLVSQGVAVVTINYRLGYFGFLAHPSLSAEQGGSSGNYGLMDQQAALRWVKNNIAQFRGDPNNVTVFGESAGGLSVQSQVASPLAAGLFNKAIVQSGAYALDLPSLAQAQAGGTAVATAAGCTDQSASCLRALTVEQILQRQTGANVVPTVDNRVLPLTLRAAFTTGSFNKVPVIEGNNADEYSLLSAARMDLVPSVGPVTAANYQARVTSLIATSGKTFEQVNAQYPLTAYATPVEAYDAIATDLVFACSGRTSARLKSASGVNVYAYEFNDPNAPMIYLPPATRPRWGAYHAAEIQYLFPTTRPNVTYTPAQQSLSNQMVAYWTAFAKSSNPNGTGPTWPQYTSANDTYLSLEPGTSRTLTNFAEKHKCTFWSGS

SEQ ID NO: 649 - DNA, 1272 bp, Unknown
  Obtained from environmental sample
atgaacgcacaccgtgccctcctgtccgcctgcgcggccttcaccctcgcgaccccggcgctgcccgtgctggccgccaacacctacccggtcatcctcgtccacggcttcgccggcttcggccgcagcgagctgctgggctacaagtactggggcgggctgaccgacctgcaggagcagttgaagacgaagtactcgaaccagctcgtggccaccgcggtggtcgggccattcagctccaactgggatcgcgccgccgaactgttctaccagatcaagggcggctgcgtggactacggcgcgctgcacgccgcggccaacgaccacctcgaacgccccgagagctatttccacaacggccgcacctgctaccccgggctgtatccggcctgggacgccaaccaccccgtgcacctgatcacgcacagcatgggcggacagacgtcccgcatgctggtgcagatgctcgccgccaacggcgcgccggccaacccgtcgctgttcccgtacgcggtcgacgcgaactggatcaagagcgtgacgaccatcgcgacgcccaacgacggcaccacgctcgcttaccgcatcgtcgactgggtgcccttcgtgcagcagctggtgacgggcatcgccggcatcgcgggcgcgaccggcgcgaacgcgatctacgacttcaagctcgatcaatggggcgtcggcccgcaggccgctggcgagagcttcagcgcctacgtcaaccgcgtgacgagcatcccgctgtggaactccggcgtgaaggacctgtctccctacgatctctcgcccgccggcgcgatggccgagaacgactgggtcaaggacgcgcccggcgtcacctatttctcgtgggtgacgaactccagctacagcggctggctcaccggctggtcgtatcccgacctcgacaccaacccgctgatcggcgcgttcgcgggcccgggcttcatgggcaactacagccgcgactggcgcccgatgccgcctgtggccgacagcgactggtaccccagcgacgcggtcgtcaacaccatcgcgcagaaggcgcctacgtgggcgatgaatgcggcgggcgtggtctacaagcgatccgtcgtcgtccgcgacatcagcaacggcggcacgccgcaggccggcgcatggaactacaagggcacgctgagcggcttcgaccacctcgacgcggtgggctggacgttgttctgggacagcctgtcctggtacaaggcgcgcgtcgacgagttgcgcgcgctgtag

SEQ ID NO: 650 - protein, 423 aa, Unknown
  Obtained from environmental sample
  SIGNAL (1)...(25)
MNAHRALLSACAAFTLATPALPVLAANTYPVILVHGFAGFGRSELLGYKYWGGLTDLQEQLKTKYSNQLVATAVVGPFSSNWDRAAELFYQIKGGCVDYGALHAAANDHLERPESYFHNGRTCYPGLYPAWDANHPVHLITHSMGGQTSRMLVQMLAANGAPANPSLFPYAVDANWIKSVTTIATPNDGTTLAYRIVDWVPFVQQLVTGIAGIAGATGANAIYDFKLDQWGVGPQAAGESFSAYVNRVTSIPLWNSGVKDLSPYDLSPAGAMAENDWVKDAPGVTYFSWVTNSSYSGWLTGWSYPDLDTNPLIGAFAGPGFMGNYSRDWRPMPPVADSDWYPSDAVVNTIAQKAPTWAMNAAGVVYKRSVVVRDISNGGTPQAGAWNYKGTLSGFDHLDAVGWTLFWDSLSWYKARVDELRAL

SEQ ID NO: 651 - DNA, 879 bp, Unknown
  Obtained from environmental sample
atgaaaatcatctctctgttatttataggtataatgacagtgaccgccccggcagacagctccgctgaaaacagcagcagcattcatcccggaaaaatggaaaacatatggccagcaggagtcaatcccgacggttggaaacaggaaaagcctgaagtatcagaattcaggaacggtgttacaaggatctcaaatgtcaatacgcccactctgacatattttccgcccgctccgggatccgacaaaaaaaacaaagctgtgatcatctgccccggagggggatatcacatcctggcaattgacaaggaaggatatgatgtcgcggattttctaagcaggcacggctttcacacctatgttctgaaataccgactgcctagaaaaggtgctgataagaaacgctggctgccggcactgcaggatgcccagcgcgcactaagcattatagcttccagaaaaaaagaactcggaattgaagaagtcggaattatgggattctcagccggaggacacctttcagcacttaccgcgtgcagacatgaaaacaggtcatataaaccggttgatgctgcggacaaagcttcatgccgtcctgacttcgccgttctgatatatccggcctatctggtaaccccccggacacataaactttcacctgaactttccgtccgtaaggggatgcccaggaccttcctggttcagactgaagacgactgtattcatgttgaaaattctcttttcttctactacgcacttaaacagaagaatattcctgcggaaatgcatatctttgctgaaggaggccacggatatgccctgtgttctgataaaccggtaaaaatctggcctgaacttctcctgaaatggctttctgaataa

SEQ ID NO: 652 - protein, 292 aa, Unknown
  Obtained from environmental sample
MKIISLLFIGIMTVTAPADSSAENSSSIHPGKMENIWPAGVNPDGWKQEKPEVSEFRNGVTRISNVNTPTLTYFPPAPGSDKKNKAVIICPGGGYHILAIDKEGYDVADFLSRHGFHTYVLKYRLPRKGADKKRWLPALQDAQRALSIIASRKKELGIEEVGIMGFSAGGHLSALTACRHENRSYKPVDAADKASCRPDFAVLIYPAYLVTPRTHKLSPELSVRKGMPRTFLVQTEDDCIHVENSLFFYYALKQKNIPAEMHIFAEGGHGYALCSDKPVKIWPELLLKWLSE

SEQ ID NO: 653 - DNA, 807 bp, Unknown
  Obtained from environmental sample
atgcgcataggactggcactttcgggtggtggagcacgaggactcgtacatgttggcgtgctcgaggcattgcgcgaagcgggcatacccattttcgcggtatcaggaacgagtgccggagcgatcgtcggatcgctgtatgccgcaggttatacgcccggagagatcatggcatttgccagggagagaagcctgatccatgtattgaatctgacgctgcccacacgcggctttgtcaggcataagtttctcaggaaactattgcgcaaacgcctgccggatgaaggcaggagtttcgatgggttgaaactccctctgtatatcacggttgcaaacctcaattccggtcttgccgagacgttttcgtcgggtccgctcctggaccttgtgatcgcatcgagttccgtgccgatcctcttcgagcccgtgcgaatcaatggcagcctgtacagcgatggcggactcatcatgaacctgccggcatcaccgctcctgccgcattgcgacttcatcattgcagtcaacctcgtcccgcaactgccggttgacgacagcgaactcaagacgctcgtcggtatcggtacacggtgctttgatctggcagcattgaacaatatcaagccggagctcgcatattgtgatgtggtcatcgagccgccggagataagccgtttcagccgcttcagtgtgtcaaacgttcagcgtatgttcgacataggctatgaagagacccaaaaacacctcgcgtacatcgctgatcatatagaccggcgggaggatgacacagtacgtgctgcagcgaaataa

SEQ ID NO: 654 - protein, 268 aa, Unknown
  Obtained from environmental sample
  DOMAIN (5)...(165): Patatin-like phospholipase
MRIGLALSGGGARGLVHVGVLEALREAGIPIFAVSGTSAGAIVGSLYAAGYTPGEIMAFARERSLIHVLNLTLPTRGFVRHKFLRKLLRKRLPDEGRSFDGLKLPLYITVANLNSGLAETFSSGPLLDLVIASSSVPILFEPVRINGSLYSDGGLIMNLPASPLLPHCDFIIAVNLVPQLPVDDSELKTLVGIGTRCFDLAALNNIKPELAYCDVVIEPPEISRFSRFSVSNVQRMFDIGYEETQKHLAYIADHIDRREDDTVRAAAK

SEQ ID NO: 655 - DNA, 927 bp, Unknown
  Obtained from environmental sample
atgtcacttgatccacaaacgaaatttgtattagcccaattggctgctgccgatgctcctccaatggagactttgtcaccggaaatggctagacaggcattcatattgccgcaaggtgcagtggaggaagtagggaaggtagaaaatcgaacgattcctggtcctgcaacggacatccctgtccgtgtttattaccctaaagaactccagcctgaaaatcccgcgctagttttctatcatggcggcggctgggtaattggcaatttggactctcatgacgatatttgccgtgctttaaccaacctcgccaactgcgtgaccatttccgtcgactaccgcctggctccagagaataaatttcctgctgcggttgaggatgcttatgctgctgcacaatatgtgtatgaccatgcagaagatttcaaagtcgacaagacccgtattgccgttggcggtgacagtgccggtggaaatcttgccgctgtcgtgacgaatctggcaaaagacaaaaactcaccttctatttgtttccaacttctgatttatccaagcaccaatgcaggtggtgagccaacagcatcaatggttgagaatgcccatggctatttcttagaaaaaggcacgatggattggttccgtgactgctacctgaacagtgaagaagacaaacagaatccgctagtctcaccgatgctttatgatgatttccaaggactgcctccagcaattgtgattactgccgagtacgatccattgcgagatgaaggcgaagcatatgccaaaaagctgggcgaagcaggggttgctgtccaaaccatccgctttgacggtacgattcatggctttgtcagcatgtcggctgtcattagccaagggaaggcggcattggaaaaagcaggagaggctttaactaaagcctttcaataa

SEQ ID NO: 656 - protein, 308 aa, Unknown
  Obtained from environmental sample
MSLDPQTKFVLAQLAAADAPPMETLSPEMARQAFILPQGAVEEVGKVENRTIPGPATDIPVRVYYPKELQPENPALVFYHGGGWVIGNLDSHDDICRALTNLANCVTISVDYRLAPENKFPAAVEDAYAAAQYVYDHAEDFKVDKTRIAVGGDSAGGNLAAVVTNLAKDKNSPSICFQLLIYPSTNAGGEPTASMVENAHGYFLEKGTMDWFRDCYLNSEEDKQNPLVSPMLYDDFQGLPPAIVITAEYDPLRDEGEAYAKKLGEAGVAVQTIRFDGTIHGFVSMSAVISQGKAALEKAGEALTKAFQ

SEQ ID NO: 657 - DNA, 1236 bp, Bacteria
atgaataaaactattacgttacttagtgcattattactaccactaagttttgctcacgctgccgagccaacattgtctccagagatggtcagtgcctctcaagtaagaagcgcgcaagcgaaacaaacttacacttatgtccgctgctggtaccgcaccagttattcaaaagatgaacctgcgaccgattgggaatgggcagaaaatccagacggcagttacttcacgcttgatggctactggtggagttcggtttctttcaagaacatgttctacacagacacaccgcaaagtgttatcaagcaacgttgtgagcaaactctggacctagcaaatgaaaacgctgacatcaccttctttgcagccgataaccgtttctcctacaaccatactatctggagcaacgaccctgtcatgcagccagaccaaatcaacaaggtcgtagcattgggtgacagcttgtctgatacaggcaacatctttaatgcatcacaatggcgattcccgaatccaaatagctggttcttgggacacttctcaaacggttttgtgtggactgagtacattgctcaagcgaaaaacttaccgctatacaactgggctgtaggcggcgcggcaggcgaaaaccaatacatcgctctgactggtgtaggtgagcaagtttcctcttacttggcatatgcgaaattagcgaaaaactacaagcctgctaataccctgtttacccttgagtttggtctaaatgacttcatgaactacaaccgtagcgtgccagaagtgaaatcagactacgcggaagccttgattaaactgaccgatgcaggtgcgaagaacttgttgttgatgacactaccagatgcaacacgtgcaccacagtttacctactcgactcaagaagaaatcaacaagatccgcgcgaagatcgtggaaatgaatgagttcatcaaagcacaagcggcgtattacactgcacaaggctacaacgttaccttgtacgatacgcatgcactgtttgaaagcttaacagcaaatccagagcaacacggttttgtaaacgcgagccaagcttgccaagacatcaaccgctcttcatcggtggattacctataccatcatgcattgcgttctgagtgtgcgtcttctggctctgataagtttgtattctgggacgtaacgcacccgaccacagcaacacaccattacgtggcagaaaaaatgctagaaagtacgaatcaa

SEQ ID NO: 658 - protein, 412 aa, Bacteria
  SIGNAL (1)...(20)
  DOMAIN (147)...(406): GDSL-like Lipase/Acylhydrolase
MNKTITLLSALLLPLSFAHAAEPTLSPEMVSASQVRSAQAKQTYTYVRCWYRTSYSKDEPATDWEWAENPDGSYFTLDGYWWSSVSFKNMFYTDTPQSVIKQRCEQTLDLANENADITFFAADNRFSYNHTIWSNDPVMQPDQINKVVALGDSLSDTGNIFNASQWRFPNPNSWFLGHFSNGFVWTEYIAQAKNLPLYNWAVGGAAGENQYIALTGVGEQVSSYLAYAKLAKNYKPANTLFTLEFGLNDFMNYNRSVPEVKSDYAEALIKLTDAGAKNLLLMTLPDATRAPQFTYSTQEEINKIRAKIVEMNEFIKAQAAYYTAQGYNVTLYDTHALFESLTANPEQHGFVNASQACQDINRSSSVDYLYHHALRSECASSGSDKFVFWDVTHPTTATHHYVAEKMLESTNQ

SEQ ID NO: 659 - DNA, 933 bp, Unknown
  Obtained from environmental sample
atgctcctcccgttgttcgtgaccgcgtgtgtcggcgtggtcgagggcggagagagtgatcgacccgacgcggtcgagaccacgcccgggtccgcgcccggcccgacgccggatccgccgcgcgcgctgcccgcggggaagctcgcgatcgtcctcgcccacgggctcgacggcaacgtcgacagcttcgaccccgcgatcgtcgccgcgatccaggcggacggtcacgtggtgaagcgcaccgaggtgccggcggtcgacagcatcgcagtgcgcgcggcggcgctcggcccgcagatcgaccggttcctcaccgagaccggcgccacgcaggtccacatcatcgcgcactcgatgggcggcctcgattcgcgctacctgatctcgaagctcgggtacgcgagcaaggtcgcgtcgctgacgacgatgtcgacgccgcaccggggctcgccgatcgcggacgtggcgctcggcctcaccacgagctcgctgctcagccagtccgccgcgctcgatgcgctcaccgcgctgttcggcaccgacccggcgtcgctcgaccgcgcgctcgtcgacctcagcgtccgccaggccgaggtgttcaacgcgacggtcaccgacgccccgggcgtgaagtacttctcgtacgccggcttcagcacgccgggtcaggtcagcaacagcaacgcggccgcgagctgcgggacgctgccgcccggcccgacgcagaccgccctcgcggtcgtgcagccgatcgtcgcgaacggcttcgaccggatcccgagcgacgcggtcgtctcgatcccgagcgcgacctggggcacgttcctcggctgcgtcgccgccgaccacctctccgagatcaaggcgccgacgccgacccacgactcggcgacgttcttcaaaaacgtcgtcgcgcggctcgcgacgctgtga

SEQ ID NO: 660 - protein, 310 aa, Unknown
  Obtained from environmental sample
MLLPLFVTACVGVVEGGESDRPDAVETTPGSAPGPTPDPPRALPAGKLAIVLAHGLDGNVDSFDPAIVAAIQADGHVVKRTEVPAVDSIAVRAAALGPQIDRFLTETGATQVHIIAHSMGGLDSRYLISKLGYASKVASLTTMSTPHRGSPIADVALGLTTSSLLSQSAALDALTALFGTDPASLDRALVDLSVRQAEVFNATVTDAPGVKYFSYAGFSTPGQVSNSNAAASCGTLPPGPTQTALAVVQPIVANGFDRIPSDAVVSIPSATWGTFLGCVAADHLSEIKAPTPTHDSATFFKNVVARLATL

SEQ ID NO: 661 - DNA, 1251 bp, Unknown
  Obtained from environmental sample
atgaaatgctgtcgggttatgtttgtgttgctcggattatggcttgtattcggcctatcggtcccgggagggcgagctgaagcggcagtttcacgcgccaacgatgcgccgattgtacttctccatggctttactggctggggaagagaagaaatgtttgggttcaagtactggggcggcgtgcgcggcgatatcgaacaatggctgaacgacaacggttatcgaacttatacgctggcggtcggaccgctctcgagcaactgggaccgggcgtgtgaagcgtatgctcagcttgtcggcgggacggtcgattatggggcagcccatgcggcaaagcacggccatgcgcggtttggccgcacttatcccggcctgttgccggaattgaaaaggggtggccgcatccatatcatcgcccacagccaaggggggcagacggcccgcatgcttgtctcgctcctagagaacggaagccaagaagagcgggagtacgccaaggcgcacaacgtgtcgttgtcaccgttgtttgaaggtggacatcatgttgtgttgagtgtgacgaccatcgccactcctcatgacgggacgacgcttgtcaacatggttgatttcaccgatcgcttttttgacttgcaaaaagcggtgttgaaagcggcggctgtcgccagcaacgtgccgtacacgagtcaagtatacgattttaagctcgaccaatggggactgcgccgccagccgggtgaatcgttcgaccattattttgaacggctcaagcgctcccctgtttggacgtcgacagataccgcccgctacgatttatccgtttccggagctgagaagttgaatcaatgggtgcaagcaagcccgaatacgtattatttgagctttgccacagaacggacgtatcgcggagcgctcacaggcaactattatcccgaactcggaatgaatgcattcagcgcggtcgtatgcgctccgtttctcggttcgtaccgcaatccgacgctcggcattgacgaccgctggcttgaaaacgatggtattgtcaatacggtttccatgaacggtccaaagcgtggatcaagcgatcggatcgtaccgtatgacggggcgttgaaaaaaggggtttggaatgacatgggaacgtacaatgtcgaccatttggaaatcatcggcgttgacccgaatccgtcatttgatattcgcgccttttatttgcgacttgccgagcaattggcgagcttgcggccttaa

SEQ ID NO: 662 - protein, 416 aa, Unknown
  Obtained from environmental sample
  SIGNAL (1)...(28)
MKCCRVMFVLLGLWLVFGLSVPGGRAEAAVSRANDAPIVLLHGFTGWGREEMFGFKYWGGVRGDIEQWLNDNGYRTYTLAVGPLSSNWDRACEAYAQLVGGTVDYGAAHAAKHGHARFGRTYPGLLPELKRGGRIHIIAHSQGGQTARMLVSLLENGSQEEREYAKAHNVSLSPLFEGGHHVVLSVTTIATPHDGTTLVNMVDFTDRFFDLQKAVLKAAAVASNVPYTSQVYDFKLDQWGLRRQPGESFDHYFERLKRSPVWTSTDTARYDLSVSGAEKLNQWVQASPNTYYLSFATERTYRGALTGNYYPELGMNAFSAVVCAPFLGSYRNPTLGIDDRWLENDGIVNTVSMNGPKRGSSDRIVPYDGALKKGVWNDMGTYNVDHLEIIGVDPNPSFDIRAFYLRLAEQLASLRP

SEQ ID NO: 663 - DNA, 489 bp, Unknown
  Obtained from environmental sample
atgaatcggctgcacaagtcgacgctcaagatagagcgcctggaaatcgcggaaggtcgcaagatgctctgtgacctcaagcagaaccgcgagagacgctatccgcttgactgcggcgtgagactttcggtcattacgaaccaagggacgctgcacgtgcagactgcccccggcttcgtattcgacgggcggagcggcccgaaaatagtggactggtacgccccgaacctcggcaacctctacgagattgtctgctggttcgtacacgactgcaacggctacggccaggacttgagcttcaaggacacaaacatcatgctgtacgccatgctgcgcgacctcgcggagtaccgaccgaccaagtgcgccgtaatccagctcgccgtgagcctttcggattcgtggtacggagagccgaagaaggacgactggtgctacgccaaccgccacctcgtatctacgctgtggatcccgaaggaggccgcataa

SEQ ID NO: 664 - protein, 162 aa, Unknown
  Obtained from environmental sample
MNRLHKSTLKIERLEIAEGRKMLCDLKQNRERRYPLDCGVRLSVITNQGTLHVQTAPGFVFDGRSGPKIVDWYAPNLGNLYEIVCWFVHDCNGYGQDLSFKDTNIMLYAMLRDLAEYRPTKCAVIQLAVSLSDSWYGEPKKDDWCYANRHLVSTLWIPKEAA

SEQ ID NO: 665 - DNA, 1155 bp, Unknown
  Obtained from environmental sample
atgaagggaatcgtggtattcatgatttcggtattcatttctctgttgcctgtttttgatgtatctgccgtcgagaacgtgacccagatatttgataaaggcaaccctgtagaatattttatctcgacaaaggacggctggaggctcgcgctttaccggtataagcccgatgttatcaaggaaggaacggatcccgttatcctctgccatgggtttaacatgaacagcaacttctgggaccttgacaccgcgcacagttttgccaggtacctccgagataatggttacgatgtctggagcgtcaatctgcgcggctcaggcgattcctcaaagcctgtcatggcagatttgaggggttttaccaaactgcagattgtcaaatggccgcgcacgatcgcgagcatcccgttcgaccttgataagttcaaatggtccttcgatgaccacgtgaataaagacattccggcagtcatagatttcgtgaagaaaaggaccggcaaagagaaggtcgtctggttcggccacagcatgggcgggatggtcatgtatgcctacctgaccactcatgaccagagcgacataagggccttcgcggcgatggggtctacaatgcatttcggcaagacactcggcgatgaagattccttcaatacgatacttgagcaccgcaggctcaggaacggggcgctcctcatcaataccactattgcctcccagataatgaacctctctttgggggcgatagggaataagtgggaagaggatatgtataaccccgataatattgacaggttattggccatgcgcttattccgtctcgccatcaatgatacctcccccggtgtagtcgacgcgtacgccaacctgcttgagacatgcgaacttaagaatgccgatgggactttcagctataccggaaacctcgataaggtcagcgtgccgttacttatcaccgtagcggctgtcgaccccttcggcaccatggagatatcgcgttatgcctatgaccatgtctcgtctgccgataaggagatcatagagttttccaaatcggcgggcaagtcggccgattacggccattgtgatataatacttggcaagagagcgccggaagaggtatttcccgcgctgctcgaatggctccagaatagataa

SEQ ID NO: 666 - protein, 384 aa, Unknown
  Obtained from environmental sample
  SIGNAL (1)...(23)
  DOMAIN (96)...(376): alpha/beta hydrolase fold
MKGIVVFMISVFISLLPVFDVSAVENVTQIFDKGNPVEYFISTKDGWRLALYRYKPDVIKEGTDPVILCHGFNMNSNFWDLDTAHSFARYLRDNGYDVWSVNLRGSGDSSKPVMADLRGFTKLQIVKWPRTIASIPFDLDKFKWSFDDHVNKDIPAVIDFVKKRTGKEKVVWFGHSMGGMVMYAYLTTHDQSDIRAFAAMGSTMHFGKTLGDEDSFNTILEHRRLRNGALLINTTIASQIMNLSLGAIGNKWEEDMYNPDNIDRLLAMRLFRLAINDTSPGVVDAYANLLETCELKNADGTFSYTGNLDKVSVPLLITVAAVDPFGTMEISRYAYDHVSSADKEIIEFSKSAGKSADYGHCDIILGKRAPEEVFPALLEWLQNR

SEQ ID NO: 667 - DNA, 1422 bp, Unknown
  Obtained from environmental sample
atgaaaaggaaactatgtacatgggctctcgtaacagcaatagcttctagtactgcggtaattccaacagcagcagaagcttgtggattaggagaagtaatcaaacaagagaatcaagagcacaaacgtgtgaaaagatggtctgcggagcatccgcatcattcacatgaaagtacccatttatggattgcacaaaatgcgattcaaattatgagccgtaatcaagataagacggttcaagaaaatgaattacaatttttaaatacccctgaatataaggagttatttgaaagaggtctttatgatgctgattaccttgatgaatttaacgatggaggtacaggtataatcggcattgatgggctaattcgaggagggtggaaatctcatttctacgatcccgatacaagaaagaactataaaggggaggaagaaccaacagctctttctcaaggagataaatattttaaattagcaggtgaatactttaagaagaatgattggaaacaggctttctattatttaggtgttgcgacgcactactttacagatgctactcagccaatgcatgctgctaattttacagctgtcgacaggagtgctataaagtttcatagtgcttttgaagattatgtgacgacaattcaggaacagtttaaagtatcagatggagagggaaaatataatttagtaaattctaatgatccgaaacagtggatccatgaaacagcgagactcgcaaaagtggaaatcgggaacattaccaatgatgtgattaaatctcactataataaaggaaacaatgctctttggcagcaagaagttatgccagctgttcagagaagtttagaacaagcccaaagaaatacggcgggatttattcatttatggtttaaaacatatgttggaaaaacagctgctgaagatattgaaaatactatagtgaaagattctaggggagaagcaatacaagagaataaaaaatactttgtagtaccaagtgagtttttaaatagaggcttaacatttgaagtgtatgctgcttatgactatgcgttattatctaaccatgtggatgataataatattcatggtacaccggttcaaattgtatttgataaagaaaataatgggatccttcatcaaggagaaagtgcattgttaaagatgacacaatccaactacgataattatgtatttctaaattattctatcataacaaattgggtacatcttgcaaaaagagaaaacaatactgcacagtttaaagtgtatccaaatccaaataatccaactgaatatttcatatatacagatggctatccagttaattatcaagaaaaaggtaaagagaaaagctggattgttttaggaaagaaaacggataaaccaaaagcatggaaatttatacaggcggaataa

SEQ ID NO: 668 - protein, 473 aa, Unknown
  Obtained from environmental sample
  SIGNAL (1)...(27)
  DOMAIN (1)...(303): Zinc dependent phospholipase C
MKRKLCTWALVTAIASSTAVIPTAAEACGLGEVIKQENQEHKRVKRWSAEHPHHSHESTHLWIAQNAIQIMSRNQDKTVQENELQFLNTPEYKELFERGLYDADYLDEFNDGGTGIIGIDGLIRGGWKSHFYDPDTRKNYKGEEEPTALSQGDKYFKLAGEYFKKNDWKQAFYYLGVATHYFTDATQPMHAANFTAVDRSAIKFHSAFEDYVTTIQEQFKVSDGEGKYNLVNSNDPKQWIHETARLAKVEIGNITNDVIKSHYNKGNNALWQQEVMPAVQRSLEQAQRNTAGFIHLWFKTYVGKTAAEDIENTIVKDSRGEAIQENKKYFVVPSEFLNRGLTFEVYAAYDYALLSNHVDDNNIHGTPVQIVFDKENNGILHQGESALLKMTQSNYDNYVFLNYSIITNWVHLAKRENNTAQFKVYPNPNNPTEYFIYTDGYPVNYQEKGKEKSWIVLGKKTDKPKAWKFIQAE

SEQ ID NO: 669 - DNA, 765 bp, Unknown
  Obtained from environmental sample
atgaataagaatgatattgatgaggtggatagattgaacaaaaaatatgaatatgaaaaaaaaggcccaaaagcggttattttattccatgcttatacgggaacaccaaatgatgtgaatagtgttgctagagctttagaaagagaaaattataccgtgttatcaccaacccttgacggtcacggtttggaggatcccaatgagttgttagagtatgggattgaagactggataaaaaatggggaagaagcctatcaaactttaagagaagatggctatacggatatttccgtttttggcttatcgttaggtggagttgttgccacagatattatgctaaaacatgacgtgaagagttatggtgttttctcatcaccagtcattacaaatgaagactcaaacgtgccccaaaatttctggctatggtacaaattcaaaatgaaaaaactaggcatggatcaaaaagaaattgaagagaacaaacaagaagtaatgaaaaaagtagaaaaacgattaaaagaaatcaatgactatgtagcaacaatgtccgctaaatacgaagaaattgaaatacctgtatttattggccaaggtggtcaagatgaaatggtcaatccaaatcatgcctatacatttaaagacagattagtaaatgctgaagtggattttcattggtatgaagaagcgcctcacgtcattaccgttggacgcatcggaaaagaattacaagaagatttactcgaatttttagagaaatatgcctaa

SEQ ID NO: 670 - protein, 254 aa, Unknown
  Obtained from environmental sample
MNKNDIDEVDRLNKKYEYEKKGPKAVILFHAYTGTPNDVNSVARALERENYTVLSPTLDGHGLEDPNELLEYGIEDWIKNGEEAYQTLREDGYTDISVFGLSLGGVVATDIMLKHDVKSYGVFSSPVITNEDSNVPQNFWLWYKFKMKKLGMDQKEIEENKQEVMKKVEKRLKEINDYVATMSAKYEEIEIPVFIGQGGQDEMVNPNHAYTFKDRLVNAEVDFHWYEEAPHVITVGRIGKELQEDLLEFLEKYA

SEQ ID NO: 671 - DNA, 891 bp, Unknown
  Obtained from environmental sample
atggatggcggcacggccaaggtgggcgacggcatcgcctatgccgacgggccgcggcacaagctcgacatctatgcgcccgagcaacgcggcgcgcccgccccggtcgtgtttttcatctatggcggcggctggaaccggggcgagcgcagcgactatcagttcgtcgggcgcgccctggcctcgcgcggcttcgtcactgtcattgccgactatcggctggtgccggaagtacggtttcccggcttcctgaccgacagcgccaatgcgttgcgctgggtgcaggacaatattgccaattacggcggcgaccccaatcggctgtttctcgccgggcattcggccggtgcctataatgcggtcatgctggcgctcgaccctgcctatcggcaggaattcggcgtcaccatgccgatcctggcggtggcggccctgtcgggcccctatgatttctatccgttcgaatatttcgaggtgcaggaggctttcggccaggcgcccaatccggaagggacgcagccgatcaacctgatcaccgccgaggcgccaccgatgtatctggcgaccggcactaccgatccgatcgtgcgggtgcagaataccgaacgctttgccgatcggctgcgggcccagggcgtgtgggtgacgaccagatattacgaggggttcgggcatatggaaccggtgatcgccatgggcgcgctgtggcgttggcgcatgccggtactcgatgagatggtcggctttttccagcgtttcggcgcctttcccagcggcgtgccctatctcgccgtgacgccggaagcgccacaaatgctgcccgattcggtggcgccgaccgatgaaatcgtccgccagctcaacgagatgttccagccgatcgaggaatag

SEQ ID NO: 672 - protein, 296 aa, Unknown
  Obtained from environmental sample
MDGGTAKVGDGIAYADGPRHKLDIYAPEQRGAPAPVVFFIYGGGWNRGERSDYQFVGRALASRGFVTVIADYRLVPEVRFPGFLTDSANALRWVQDNIANYGGDPNRLFLAGHSAGAYNAVMLALDPAYRQEFGVTMPILAVAALSGPYDFYPFEYFEVQEAFGQAPNPEGTQPINLITAEAPPMYLATGTTDPIVRVQNTERFADRLRAQGVWVTTRYYEGFGHMEPVIAMGALWRWRMPVLDEMVGFFQRFGAFPSGVPYLAVTPEAPQMLPDSVAPTDEIVRQLNEMFQPIEE

SEQ ID NO: 673 - DNA, 873 bp, Unknown
  0
atgaatcattttgtttatttaatggataaatatggcaatccatattctttttccttaaaaccaaaatattataaaacattggtactttctggtggcgcaatgcgtggtgtatatttattgggagcattaaatggtttaaaaataaaaataaacaaaatatcaacgtttataggtatatcatctggttctataatatgttttttattaagtatagggtatactccatatgaaatttttataagtttattaaaatatgataatctcttgactattaatttagataaattatattcaggtgataccaggaatgaaggaggattgttttcaagtgagaatatctttaaacatcttgaaactcaaatgcgtttaaaagaaatttcaagatctataacttttaaagaacattttgaaaaaacaggtaaaatattaattgttatggcttttaatattacaaaatgtaaagaagacatatttacatatgaaacaactcctgatatggaaattttgaattctttaaaattaagcgcaagaatcccaatcatatttggacccataaaatataataataatttttatatagacggaggcgtttggaacaattttccaattgatattgcaattaagtatcataataaaaaaaataaaaagaaaagtgattggataatagctgtaacaaccttgttttcaacttacaaacaaaatatacatcaatggtataaattttcaaatataaatattgttatggtaaatgatacacccgatttaaatccatcattagtatcatctgatttagaaaaattaactatgtttaacaaaggagaagaaaaagcgagtcttattaaaaaacaaaatattcgtagaaatagtatataa

SEQ ID NO: 674 - protein, 290 aa, Unknown
  0
  DOMAIN (27)...(207): Patatin-like phospholipase
MNHFVYLMDKYGNPYSFSLKPKYYKTLVLSGGAMRGVYLLGALNGLKIKINKISTFIGISSGSIICFLLSIGYTPYEIFISLLKYDNLLTINLDKLYSGDTRNEGGLFSSENIFKHLETQMRLKEISRSITFKEHFEKTGKILIVMAFNITKCKEDIFTYETTPDMEILNSLKLSARIPIIFGPIKYNNNFYIDGGVWNNFPIDIAIKYHNKKNKKKSDWIIAVTTLFSTYKQNIHQWYKFSNINIVMVNDTPDLNPSLVSSDLEKLTMFNKGEEKASLIKKQNIRRNSI

SEQ ID NO: 675 - DNA, 948 bp, Unknown
  Obtained from environmental sample
atgaaaacactattccgtctagcattgattcttacccttattctatcctgcgcatatattaatgctcagcataaggttatacatgtctggccaggtgttgcccccggatctgaggactggaaatattctgaaattgaatacctgaatgagcagaatcagaagatggtccgtaatgttgttactccaactcttacagcctatttgcccgatcctgctaaggccacaggtacggcggtaatagttgccccgggaggaggatttcgcttcctctcctggcaggatgaaggtacagaggtagcagagtggcttgtaaaccatgggattgctgctttcgttttgaaataccggcttgttaataccggtgccacccaggaagagtttcaaaaagccataatgacaatggttgctgaaataaatgcttcgatgcaagctgaaaatgaaggcaaacctgccggaaatataactgaaaataaaaacttttcagaacctgcacaaattggaatcgaagacgggaaacaggcaatatggctactacgcaagcaggctgcaaagtatggaataaagcccaatcgcattggcattataggattttctgcaggaggtatggtaacactgggcgcagcccttacaacagatcctgaaagccgtcccgattttgccggcgccatatatgctccatggtcgggaggtgccgtttctgaggataccccgccaattttcatccttgctgctgctgacgacaaacttgcagctcctggcagtatattgacatataacaactggattgcagccggaaggcaggccgaacttcatatttattcaaagggaggacatggctttggcatgcagaagaaagggcttcctgttgatagctggattgaaagattcggagactggatgaagtctcagggactaatgacaattacagaaaaaaccacagtaaaatga

SEQ ID NO: 676 - protein, 315 aa, Unknown
  Obtained from environmental sample
  SIGNAL (1)...(22)
MKTLFRLALILTLILSCAYINAQHKVIHVWPGVAPGSEDWKYSEIEYLNEQNQKMVRNVVTPTLTAYLPDPAKATGTAVIVAPGGGFRFLSWQDEGTEVAEWLVNHGIAAFVLKYRLVNTGATQEEFQKAIMTMVAEINASMQAENEGKPAGNITENKNFSEPAQIGIEDGKQAIWLLRKQAAKYGIKPNRIGIIGFSAGGMVTLGAALTTDPESRPDFAGAIYAPWSGGAVSEDTPPIFILAAADDKLAAPGSILTYNNWIAAGRQAELHIYSKGGHGFGMQKKGLPVDSWIERFGDWMKSQGLMTITEKTTVK

SEQ ID NO: 677 - DNA, 717 bp, Unknown
  Obtained from environmental sample
atgtcggcaatggggacagttcgaaaagtgcttgaaggaggacggctttcggtcctcggcttcgcgatcgcggcgcttgccttcacatcgccggcgcacgcgcaggacgacaagatgattccgatcgcgatcccggcgcagccgaacgcgatcatgctcggaaccggtccgctgccgggcgccaccgcaccggaagtgtggcacaggcaatatggcagcctgtttgcgcgcaacgtcaccgtcgcgaccctcaccccctatctgcccgaccccgcgaaagccaacggcacggcggtgatcgtcgcgcccggtggtggtttccggacgctgtcgatggagaatgaggggtccgacgtcgccaaggcgctggcggcgcgcggcgtcgccgccttcgtgctcaaataccggctgaaccagaccccgcaggacatggcggagttcgaccgctcgatgacggcgatgttcgccagtgccgcgcgcccgacgacccgcctcaagcccgaagcggcgatcgccaaccttgcgccgcagatcgccgacgcccgtgcggccttcgcgctcgtccgcaagcgggcgggtgagtggcgggtcgaccccagccggatcgggatggtcggcttctcggccggtgccatgctgacgatggcgaccactttggcggggcaggatgccaagcccgccttcatcgggctggtctacggctcgctggagcggtga

SEQ ID NO: 678 - protein, 238 aa, Unknown
  Obtained from environmental sample
  SIGNAL (1)...(34)
MSAMGTVRKVLEGGRLSVLGFAIAALAFTSPAHAQDDKMIPIAIPAQPNAIMLGTGPLPGATAPEVWHRQYGSLFARNVTVATLTPYLPDPAKANGTAVIVAPGGGFRTLSMENEGSDVAKALAARGVAAFVLKYRLNQTPQDMAEFDRSMTAMFASAARPTTRLKPEAAIANLAPQIADARAAFALVRKRAGEWRVDPSRIGMVGFSAGAMLTMATTLAGQDAKPAFIGLVYGSLER

SEQ ID NO: 679 - DNA, 705 bp, Unknown
  Obtained from environmental sample
atgagccagaccttacatttacaatttacccgactagccgacttggattgtttggcattacctcttcaggcggaccgcccaaccatcgtgatgttgcatggttatggcgctaattttgaggatcttgccggtctcgttccgatgcttgatccaaagggccaatggaactggatctttccgaatggcattttggaagtaccgatagaccaacatgtgatgggacgtgcctggtttccaatcgacatggaggccttgcaacggcatttgatggggggtgaagtacgcagcttcgcccatcatattcccgcagggctcgaaactgcccaaaagcggatcggtgaattgatttcggctttgggtatcaaagccgaagatttggtacttgcaggctttagtcagggcgcgatggtgacgtgccatacaatgatggctatgaaggaaaaccccagggcactgattcagctttcatccacattggtttccgaagaaacctgccgggaaaacatgccccggcaccaagatcttaaaatcttccaaagccacggccaattcgatccgttattgccgattgcggcagccagagaactcaagcaggtgtttgaagcctcatccagccatgtcgattaccacgagtttgccggggctcacgagattcctctgccgattatccaaaagcttgggagctttctgcaaagcctgctctaa

SEQ ID NO: 680 - protein, 234 aa, Unknown
  Obtained from environmental sample
  DOMAIN (15)...(234): Phospholipase/Carboxylesterase
MSQTLHLQFTRLADLDCLALPLQADRPTIVMLHGYGANFEDLAGLVPMLDPKGQWNWIFPNGILEVPIDQHVMGRAWFPIDMEALQRHLMGGEVRSFAHHIPAGLETAQKRIGELISALGIKAEDLVLAGFSQGAMVTCHTMMAMKENPRALIQLSSTLVSEETCRENMPRHQDLKIFQSHGQFDPLLPIAAARELKQVFEASSSHVDYHEFAGAHEIPLPIIQKLGSFLQSLL

SEQ ID NO: 681 - DNA, 636 bp, Unknown
  Obtained from environmental sample
atgaaaaatcctatgaagaagctgtccatgctggtgtttatgacatcggtaatgtttgcgagcgttgcccatgcatgtaacgcaacgcctatcgtttttgtccacggctattctggctggaaatcccagtttgataccatgataaaccgtttccagaatgacggtacgcctgcctgtgcgatgtataaattcggttataacagtttgggcaacagcaacaagaccagtgcccggcaactgagagatttcgttaacaacatccggcccaatcacggtaaccgcagagccaacatcattgctcactccaatggtggtctggtttcacgctggtaccgggtgtttgagggcggtaacaatgctactgatcggctgatcaccctgggtactccccatcagggtacttcctgggcctatgcctgtttcagtccggcctgcttcgagatgcgttacaactcgtccttcctgcgggacctgaacggacgcggttgtgatgtgtcactttggtcggccgttgatgaaatcattattccgcagaccaatgcgcgttgtggcaacagccgccggacctccagtgtgggtcatataacgctcatgtactggggcggtgtctataatgatgtgaggcgctacctgtaa

SEQ ID NO: 682 - protein, 211 aa, Unknown
  Obtained from environmental sample
  SIGNAL (1)...(25)
  DOMAIN (28)...(209): Lipase (class 2)
MKNPMKKLSMLVFMTSVMFASVAHACNATPIVFVHGYSGWKSQFDTMINRFQNDGTPACAMYKFGYNSLGNSNKTSARQLRDFVNNIRPNHGNRRANIIAHSNGGLVSRWYRVFEGGNNATDRLITLGTPHQGTSWAYACFSPACFEMRYNSSFLRDLNGRGCDVSLWSAVDEIIIPQTNARCGNSRRTSSVGHITLMYWGGVYNDVRRYL

SEQ ID NO: 683 - DNA, 1686 bp, Unknown
  Obtained from environmental sample
atgagtatcttcaattacaagaatgcccttggcggtgacggcaaggccctctacagcgaggccattacgttggccctgtatgcctccacacccaccggcgaggccttgccgggcaccgcctggcgaccgatcagcgccagcaagctgggctaccagggcaacgtcagcgcccagggcacgatttccggcgagcaggcgatcgtcagcgacgcccagatcgaggtgctgggcaagtacgacgccagcgggcagctgctgtccatcggcctcagctttcgcggcaccgacagcctcaaggacggcatcaacgacctgcaggcggccttcgtctcgggctttgccgacaactacagccgcctggccttcgacaacctgttgggcaaggtagcggcgttcgccgtggcccagggcttgcgcggcagcgatgtgctggtcaccggccacagcctgggcgggcttggggtcaacagcctggcgaccatgagcacggagcactggggcggcttctaccaggacgccagctacgtggccttcgcctcgccaacgcagagcggcagcggcccgcaggtgctgaacatcggctatgaaaacgacccggtgttccgcgccctggatggcacgcatttcaacgcttcatccctgggcacccacgacaagccccaggagtcggcgaccaacaacattgtcagtttcaccgatcactattcatcgttccttggccagctgattccccagagcatcctcaacctcaagtcctggaccgcccacagcgcggtggattacgccgccggcctcaaccgcctgatcgactcggacttctatgacctgaccagccgtgattcgacggtggtggtctccaacctgtccgagggcaagcgcgatcaggtctgggtcaaggacctcaacctgtacgcggaaaaacacaccggcagcaccttcatcatcggcacccagagcaacgacctgctgcacggcggcaagggcaacgactatctggacggtggcgccggcaatgaccgtttccgcgatgacggcggctacaacatcatccatggcggccagggccataacgtgctggagctgcaacagccgttgaagaacttctccatcgccaacgacggcgacggcaccctgtatatccgcgatgcctacggcggcatcagcatgacccgcgacgtcggcgccctggtcagtcatgaggccgggagctggtggcaactgttcggcaaggacgtcagctacagcgtgaccgccgatggcttgcagaacggcaaccagtggaccgcctacaaccactcgctcaatggcgatgcctatggcaatgcgctggtggccagcgtcaacggcgactggctgttcggccatggcggcgatgacttgctgagcagcgacaaggccaacgtgaccttcgtcggcggcagcggcaacgacgtcatgcattccagtggtggcggggccaataccttcctgttcagcggcaacttcggctttgacctgatccacggctaccagaacagcgacaagctggtgttcatgggcgtgcccggggtcgacgcgcagtacgactacagccagcacctgtcgcagaacggcaacgacaccctgctcagtgtcggcgagttctcggtgaccctggtgggggttggcatggacagcctgtccggatcgagcctggtcttcgcctga

SEQ ID NO: 684 - protein, 561 aa, Unknown
  Obtained from environmental sample
  DOMAIN (85)...(208): Lipase (class 3)
  DOMAIN (324)...(341): Hemolysin-type calcium-binding repeat (2 copies)
MSIFNYKNALGGDGKALYSEAITLALYASTPTGEALPGTAWRPISASKLGYQGNVSAQGTISGEQAIVSDAQIEVLGKYDASGQLLSIGLSFRGTDSLKDGINDLQAAFVSGFADNYSRLAFDNLLGKVAAFAVAQGLRGSDVLVTGHSLGGLGVNSLATMSTEHWGGFYQDASYVAFASPTQSGSGPQVLNIGYENDPVFRALDGTHFNASSLGTHDKPQESATNNIVSFTDHYSSFLGQLIPQSILNLKSWTAHSAVDYAAGLNRLIDSDFYDLTSRDSTVVVSNLSEGKRDQVWVKDLNLYAEKHTGSTFIIGTQSNDLLHGGKGNDYLDGGAGNDRFRDDGGYNIIHGGQGHNVLELQQPLKNFSIANDGDGTLYIRDAYGGISMTRDVGALVSHEAGSWWQLFGKDVSYSVTADGLQNGNQWTAYNHSLNGDAYGNALVASVNGDWLFGHGGDDLLSSDKANVTFVGGSGNDVMHSSGGGANTFLFSGNFGFDLIHGYQNSDKLVFMGVPGVDAQYDYSQHLSQNGNDTLLSVGEFSVTLVGVGMDSLSGSSLVFA

SEQ ID NO: 685 - DNA, 1422 bp, Unknown
  Obtained from environmental sample
atgaaaaagaaattatgtacatgggctctcgtaacagcgatatcttctggagttgttgcgattccaaccgtagcatctgcttgcggaatgggtgaagtaatgaaacaggaggatcaagagcacaaacgtgtgaagagatggtctgcggagcatccgcaccatgctaatgaaagcacgcacttatggattgctcgaaatgcgattcaaattatgagtcgtaatcaagataagacggttcaagaaaatgaattacaattcttaaaaatacctgaatataaggagttatttgaaagagggctttatgatgccgattatcttgatgagtttaacgatggaggtacaggtacaatcggtattgatgggctaattaaaggaggctggaaatctcatttctatgatcctgatacgaaaaagaactataaaggagaagaagaaccaacagccctttcgcaaggggataaatattttaaattagcaggagattattttaagaaagaagattggaaacaagctttctattatttaggtgttgcgacgcattacttcacagatgctactcagccaatgcatgctgctaattttacagctgtcgacatgagtgcaataaagtttcatagcgcttttgaaaattatgtaacgacagttcagacaccgtttgaagtgaaggatgataagggaacatataatttggtcaattctgatgatccgaagcagtggatacatgaaacagcgaaactcgcaaaagcagaaattatgaatattactagtgataatattaaatctcaatataataaaggaaacaaagatctttggcaacaagaagttatgccagctgtccagaggagtttagagaaagcgcaaagaaacacggcgggatttattcatttatggtttaaaacatatgttggcaaaactgcagctgaagatattgaaactacacaggtaaaagattctaatggagaagcaatacaagaacaaaaaaaatactacgttgtgcctagtgagtttttaaatagaggtttgacctttgaggtatatgcttcgaatgactacgcactattatctaatcacgtagatgataataaagttcatggtacacctgttcagtttgtttttgataaagagaataacggaattgttcatcggggagaaagtgtactgctgaaaatgacgcaatctaactatgatgattatgtatttcttaattactctaatatgacaaattggttacatcttgcgaaacgaaaaacaaatactgcacagtttaaagtgtatccaaatccggataactcatctgaatatttcctatatacagatggatacccggtaaattatcaagaaaatggtaatggaaagagctggattgagttaggaaagaaaacggataaaccgaaagcgtggaaatttcaacaggcagaataa

SEQ ID NO: 686 - protein, 473 aa, Unknown
  Obtained from environmental sample
  SIGNAL (1)...(20)
  DOMAIN (1)...(303): Zinc dependent phospholipase C
MKKKLCTWALVTAISSGVVAIPTVASACGMGEVMKQEDQEHKRVKRWSAEHPHHANESTHLWIARNAIQIMSRNQDKTVQENELQFLKIPEYKELFERGLYDADYLDEFNDGGTGTIGIDGLIKGGWKSHFYDPDTKKNYKGEEEPTALSQGDKYFKLAGDYFKKEDWKQAFYYLGVATHYFTDATQPMHAANFTAVDMSAIKFHSAFENYVTTVQTPFEVKDDKGTYNLVNSDDPKQWIHETAKLAKAEIMNITSDNIKSQYNKGNKDLWQQEVMPAVQRSLEKAQRNTAGFIHLWFKTYVGKTAAEDIETTQVKDSNGEAIQEQKKYYVVPSEFLNRGLTFEVYASNDYALLSNHVDDNKVHGTPVQFVFDKENNGIVHRGESVLLKMTQSNYDDYVFLNYSNMTNWLHLAKRKTNTAQFKVYPNPDNSSEYFLYTDGYPVNYQENGNGKSWIELGKKTDKPKAWKFQQAE

SEQ ID NO: 687 - DNA, 885 bp, Unknown
  Obtained from environmental sample
atgctggtggaagaaaagatgcttttgatggcgcggcgtagtcgcgagaactatatggagaggatgggccccgtattggcagcgcgaccagcggcagtagaagtagaagagctaagcgtgtcgaccgcagccggcgaaacatcggtgtttttgtataaaccatgcgggctgtctgccaaatcgttgccggtctacctaaacattcatggcggcggctttattcagggaagtacgcaggatgacgatggctggtgccgccagattgccgccgcggtaggatgcatcgtggtcaatatcgagtaccatctggcgccggaatataaatttccgctgcaactggaagagtgctacgacgttattaaatgggtgcaggccacagcgaatgaaaatggatttgattcatcgcggattgccattggcggcagcagcgccggagcgaatttttcggcggcgctctgccagttggcacggcaaaggcaggacgtggctatttgctaccaggtgctgaactacccgccactcgatttcgtgacggacccggaaaccaagggggatcgggacccgctgcttactgcaaaggctcaggctttttttacagcctgctatctgcgcgattcgaccgatgccgccaacccgttggcatcgccgctgctggcggacagtttggctggattgccgccggctttgattattaccgcagaacttgatcctttatgcgctgaagatgagcggtatgccaagcggctggccgccgacggggtagcagtgacttatcggatgtttgccggctgttctcacgcatttactcattttggtcccgagccggccgcacaggaggcctggacgctgattcaggagaaattgcagcaagcatttaaccgataa

SEQ ID NO: 688 - protein, 294 aa, Unknown
  Obtained from environmental sample
MLVEEKMLLMARRSRENYMERMGPVLAARPAAVEVEELSVSTAAGETSVFLYKPCGLSAKSLPVYLNIHGGGFIQGSTQDDDGWCRQIAAAVGCIVVNIEYHLAPEYKFPLQLEECYDVIKWVQATANENGFDSSRIAIGGSSAGANFSAALCQLARQRQDVAICYQVLNYPPLDFVTDPETKGDRDPLLTAKAQAFFTACYLRDSTDAANPLASPLLADSLAGLPPALIITAELDPLCAEDERYAKRLAADGVAVTYRMFAGCSHAFTHFGPEPAAQEAWTLIQEKLQQAFNR

SEQ ID NO: 689 - DNA, 762 bp, Unknown
  Obtained from environmental sample
atgaagcgtcgtctggcggctctcgccgctgctgtgtccctgctcgccagcggcctggcggtcgccgccaccacggccacggccaccgccgccggggccgcgacccgcgacccggtcgtcctcgtcgccgggacgctctcgccggcggtgatcctcgagccgctcgccgcccggctgcgggccgacggctacaccgtccacatcttcgagctgcccaacctgggcaccacggacatccgggcctccgcccgggcgctgaacaccttcgccgacggcatccgggcccggtacggggcgtcgaaggtcgacctcatcggccactcccagggcggcctggtcgcccgcgcctacgtgaagtacgagggcggcgccaacgaggtcgacagcctcatcggcctcggctcgccgaactacggcacgtcgatcgccaacatcgtcgccttcctgggcctcgggaactgcatcgggatcgtggcgtgcaaccagatggcgatcgggtcgagcttcctgaacgacctgaacgcgggcgacgacaccatcggcaacgtccgctacacgaacatctacaccagcctcgacgagctggtccgcccggtcgagaacgccgccatgcgcgacggcgccaccaacgtccgggtgcagtcgcagtgctggctgcgggtggtcggccacctcggcctcatcctcgacggcaccgtgtacagcggcatccaggacgccctcgccggccgtcccgtcaccctcaactgctgggccctctag

SEQ ID NO: 690 - protein, 253 aa, Unknown
  Obtained from environmental sample
  SIGNAL (1)...(22)
  DOMAIN (36)...(238): Lipase (class 2)
MKRRLAALAAAVSLLASGLAVAATTATATAAGAATRDPVVLVAGTLSPAVILEPLAARLRADGYTVHIFELPNLGTTDIRASARALNTFADGIRARYGASKVDLIGHSQGGLVARAYVKYEGGANEVDSLIGLGSPNYGTSIANIVAFLGLGNCIGIVACNQMAIGSSFLNDLNAGDDTIGNVRYTNIYTSLDELVRPVENAAMRDGATNVRVQSQCWLRVVGHLGLILDGTVYSGIQDALAGRPVTLNCWAL

SEQ ID NO: 691 - DNA, 789 bp, Unknown
  Obtained from environmental sample
atgagcgtggaggctggcgcgatcgcgctgcaggggcgccgtgtcctcctggtctatggtctgatgggggaggtcgtcgccgcgttccgtccgctgggactcgaatacatgcaccccctggccgactggctgcaggccgagggcgcccacgccagggtggtgaagctgcggaccgcggaatcagtgtcgtccaacgcggcgcggctgcgcgcggaactcctcgccgagccggagcccgcgctggtcgtcgcccacagcaagggcgggctggaagcgctggcggcgctgctcgatcccgtggcgcaggcgcggtgcgtcggcttcctggccatgcaatcgcctttcttcggcagcccgatcgccgacctggtcgtgggtgcgaagccgctcgagacggccgcgggcggtctcgcccggctgctcggcatcggcaccgaggagggcgtgcgcgacctgacgacctcggcgcggcgggcctggatggcggcagcggaagcgcccatcgcgcggctgatcgccgccatgcccgtcgtctgcctggcgacggcgctgagcgaggggcaggcgagcgggcgggagaggctgcacctcgccgccgcgcaatggatggagaagcggggctatggccccaatgacgggctggtgccggtggacagcgcgctgatcccgggcgcccgccatgtggtgctgccgggcagccacatcgcgacggtcagccgcggcccggggcgtgacccggtggccctgatgcgggtggggctcgatgccctgtccgccgcgccggcctga

SEQ ID NO: 692 - protein, 262 aa, Unknown
  Obtained from environmental sample
MSVEAGAIALQGRRVLLVYGLMGEVVAAFRPLGLEYMHPLADWLQAEGAHARVVKLRTAESVSSNAARLRAELLAEPEPALVVAHSKGGLEALAALLDPVAQARCVGFLAMQSPFFGSPIADLVVGAKPLETAAGGLARLLGIGTEEGVRDLTTSARRAWMAAAEAPIARLIAAMPVVCLATALSEGQASGRERLHLAAAQWMEKRGYGPNDGLVPVDSALIPGARHVVLPGSHIATVSRGPGRDPVALMRVGLDALSAAPA

SEQ ID NO: 693 - DNA, 1152 bp, Unknown
  Obtained from environmental sample
atgacaacagttccagaacagcttgacgccaaagtcgctgacgcgcttgacccgatcattgatgcagcactcaccgaaggtcgattggcaggcggcgtcgcactggtggcaaagcgtggaaagttggtctatgcacgcgctgctggttttgccgatattgagagcaagcgtcccatgacccgagacgccatcttccttgcggcctcgctcaccaagccgattgtgacagccgcgttcctctcattggtcgaggacggcgtgatgagcatggatgagccgatcacaaaatacctccccgacttcacaccggcgtttgagggtaagacacagcagatcacgttgcgccaactactcactcatacgtctggtctttcctatggtttcctgcaaccggcagacggtccctatctgcgcctcggcgtttcggatgggttgaacgaaccgggtcggtcctttgctgacaacttggcgcggattgtcgaagccggtctgttctttccgccgggcggggcttggctctactcggtcagcatggatgtgttgggtgcggcgatggaagtggcgaccggcaagagcttgccgcaagtcgtaagcgagcgtgtgtccagcaagctcggcatggcagatagcgggtttgcaatcacggatcgcgcgaggctcgcaacaccttatgcagatggtccgccgccggtgcccatgggaaacgatttcgttttccccttcgccgaactttcaggcattcgcttcacgcccggccgcattttcgatcagacgtcgtttccatcgggcggcggcggcatggcgtgcagcgcgcctgatctgctgacctttctggaagccatccgcactggtggcgcaccgattgtgaaggctgagacagcaaaggcgatgatgaccaaccagactggctcgcacgccttgctactgaacggccccggttggggctttgggtatggtggcgcggtgttgctggacccgacgccaaccgcttcgcgcctgccagtgggcacatggacctggggtggtgtttacggtcacagctggtccgtcgatccaacaggagagacgagctgtgtcttgatgaccaacaccacggtcgaagggatggcgggtgcattgtctgtcgatttgatggctgcagcattggcatga

SEQ ID NO: 694 - protein, 383 aa, Unknown
  Obtained from environmental sample
  DOMAIN (16)...(383): Beta-lactamase
MTTVPEQLDAKVADALDPIIDAALTEGRLAGGVALVAKRGKLVYARAAGFADIESKRPMTRDAIFLAASLTKPIVTAAFLSLVEDGVMSMDEPITKYLPDFTPAFEGKTQQITLRQLLTHTSGLSYGFLQPADGPYLRLGVSDGLNEPGRSFADNLARIVEAGLFFPPGGAWLYSVSMDVLGAAMEVATGKSLPQVVSERVSSKLGMADSGFAITDRARLATPYADGPPPVPMGNDFVFPFAELSGIRFTPGRIFDQTSFPSGGGGMACSAPDLLTFLEAIRTGGAPIVKAETAKAMMTNQTGSHALLLNGPGWGFGYGGAVLLDPTPTASRLPVGTWTWGGVYGHSWSVDPTGETSCVLMTNTTVEGMAGALSVDLMAAALA

SEQ ID NO: 695 - DNA, 642 bp, Unknown
  Obtained from environmental sample
atgttacgcacactttacctgatcttggtattgatggggcttttcccattgtcctctacggttatggccgatacgcccaaaacttccactattttagtgtggggcgacagtttaagtgcggcttatggcatcccggtcgaaaaaggctgggtcaatttaatgcgaaccaagttaggcactgagtttaatgtcgtcaatggcagtattagtggagaaaccactgctggaggcttaagccgcttacctaaagcattaacagattatcaacctgattatgtattgatagaattaggggcgaatgatggtttgcatggtattgctaccgacatcatgaaagctaaccttagcaaaatgattgaactcagtcagaccaatcatgccaaggtggtattaattgggattcagctcccccccaatttcggtaatgcttttacggataagtttgatgccacttatacggatttagctaaacaatataacttgcctttagtgccatcattaatgaccaatgtggcagaaaattgggatttaattcaagctgatggtttgcacccaaccgcagaagcacagccattattgcttgaaaatgtatggaaggtggtagaaaccgttttaaaaccaactactcccgccaaatcataa

SEQ ID NO: 696 - protein, 213 aa, Unknown
  Obtained from environmental sample
  SIGNAL (1)...(23)
  DOMAIN (31)...(197): GDSL-like Lipase/Acylhydrolase
MLRTLYLILVLMGLFPLSSTVMADTPKTSTILVWGDSLSAAYGIPVEKGWVNLMRTKLGTEFNVVNGSISGETTAGGLSRLPKALTDYQPDYVLIELGANDGLHGIATDIMKANLSKMIELSQTNHAKVVLIGIQLPPNFGNAFTDKFDATYTDLAKQYNLPLVPSLMTNVAENWDLIQADGLHPTAEAQPLLLENVWKVVETVLKPTTPAKS

SEQ ID NO: 697 - DNA, 828 bp, Unknown
  Obtained from environmental sample
atggatagaaaaaaagtcggtttggcactttcgggcggcggggcgcgtggatttgctcatttgggcgttctgaaagttttggaggcgcataatattccgattgattttatcgccggaacttccgccggttcgatcgcgggtgcggcgttagcgagcggtttgaccgttgccgaaattatcgaaatgggtcgcaaagccagttggtataattttgtcggctttccgtattcaaccaagggattgctttcaaatgcgccgatgggagaattttacaaacgtcatctgccgataaaccgttttgaagacttaaaaattccctttgccgccgttgcctgcgatctggaaactggtgaagaagtcgtttttaaagaaaatggtgacttaataatggcgattcgcgccagttgtgcgattccgggcgtgttcgttccggttgaagacgaaacgggtaaaagatttattgacggcggggtggtcgcggcggttccgactaaagccgttcgcaaactcggcgcggaaatcattatcgctgttgatgttatttcttcgggcgcaaaatattggggaagcccgtccacactgctcggagttgtctttcaatcaatgatgatgctcctgcgcgccgcttcaaaagcgcatcattttcgcgctgatgtggttatcattccggcaatcgcccatcttcgccccgacgagatcggtaaaatggatgaatttatcaaagcaggtgaagaagccgcgctcgaaaagatcgatgaaataaaggctttgatcaatactgaaactttaaaaaacttaaaaaagatgcccgcggaaaacgcggaatga

SEQ ID NO: 698 - protein, 275 aa, Unknown
  Obtained from environmental sample
  DOMAIN (8)...(168): Patatin-like phospholipase
MDRKKVGLALSGGGARGFAHLGVLKVLEAHNIPIDFIAGTSAGSIAGAALASGLTVAEIIEMGRKASWYNFVGFPYSTKGLLSNAPMGEFYKRHLPINRFEDLKIPFAAVACDLETGEEVVFKENGDLIMAIRASCAIPGVFVPVEDETGKRFIDGGVVAAVPTKAVRKLGAEIIIAVDVISSGAKYWGSPSTLLGVVFQSMMMLLRAASKAHHFRADVVIIPAIAHLRPDEIGKMDEFIKAGEEAALEKIDEIKALINTETLKNLKKMPAENAE

SEQ ID NO: 699 - DNA, 969 bp, Unknown
  Obtained from environmental sample
atgacgcttccgcaccgacgttcgcacctgcgcccgattgatgagaggctctttgcccgctggctagcggccggcgccgtcgcaatgctgctcagtgtcactgcttgcgccgcgcaaccggcgaaaagcgagcgaccagcggccgctgacgtggttcgggtctggccgggggcggctcccggcacggagagttggaccggagcggaggtcgagctggacgccgatttgccggccggcaaagtccgggtcgtcaccaatgtcaccgcgccggcgctgacgatcgtgcgccccaagccgggcaccgccaacgggaccgcgatgctggttctacccggcggtgcattccgggcgctcgcctgggacctcgaaggaaccgaagccgcgcaacggctggccggccgcggcatcacggcctttgtcctcaaatatcgcgtccggcccccggtcggagcgcccgccgggccggaatctttcgacgccttcaccgttcgaacgcagccagcgagagacattgcggtcgccgacgcccggcaggcgcttcgcctgatccgggcacgggcgaaagactatggcatctcggccgatcggatcggaatgatcggcttttcagctggagccatggcggtaatggagctggcgctggcgcaagaggtgacggatcgcccgaacttcgcagcgtccatctatggagcggcgcccaccgagcggcaaccggccgccggcgccccgcccttgttccttgtggctgctcaggacgatccccaggtcccctccgaccgaagcgtcgatctgtatcgccgctggacccaagcgggcctgcccgccgagctgcacctctacgaaaagggcgggcacggcttcggcacgcgcgcccgcaacctccccgcggaccagtggcttgaagcgctcgaggcctggctcatctcccgccgcctggcgccaccacccgcagcggccaagcacaaataa

SEQ ID NO: 700 - protein, 322 aa, Unknown
  Obtained from environmental sample
  SIGNAL (1)...(37)
MTLPHRRSHLRPIDERLFARWLAAGAVAMLLSVTACAAQPAKSERPAAADVVRVWPGAAPGTESWTGAEVELDADLPAGKVRVVTNVTAPALTIVRPKPGTANGTAMLVLPGGAFRALAWDLEGTEAAQRLAGRGITAFVLKYRVRPPVGAPAGPESFDAFTVRTQPARDIAVADARQALRLIRARAKDYGISADRIGMIGFSAGAMAVMELALAQEVTDRPNFAASIYGAAPTERQPAAGAPPLFLVAAQDDPQVPSDRSVDLYRRWTQAGLPAELHLYEKGGHGFGTRARNLPADQWLEALEAWLISRRLAPPPAAAKHK

SEQ ID NO: 701 - DNA, 1446 bp, Unknown
  Obtained from environmental sample
atgaaactgacgctctatcctagagtggcgacggcggactgtttacgggtctgggccgcggcttttaatgcggtctccccgccggcgcttcattggaaactgaatggcaaggcgacggcgccctccgttgtccggccgatggaaagcgccttgcctccgaacatgctcgcaggaaaccgtccgcgcacgtttgcgggcgtttttgagttttccgggctcgatccggaccggcattacaacgtcgaatgcaaatcgaatggcgtgcgggaggaactcgagtcctggaccttgccgagccaggtgcccgaaggattgaataactggtttcacattctgctggtctcctgcttctatggtgcacaagacaagcgcggcctggccggattcgtcgcgaatgagatccggcaagcgatccggccgcatctgactctctttctgggcgaccaggtttatctcgacctgccgacactgcagaaccttcccaatgacatgatccggttggcggagaatttcgagacaaaatacgtcacgaattggggcagcccgctggggctggcccggctcctaaaggcggctccgtcggcatttctttccgacgatcacgagtattggaacaattttcctcatgccgcaaccgtcgtgcagcatagctggaccgaggaaggacgccgtcgttggaggcttccggccagccggctctatgaggcctttcaactatctgcgcccgcgaaatccggcgctgccgtcaccgtcgatgttccaccgctttcgatctttctggccgacacccgaacgttccgcgatccggactgccggcattccatgcagccgggtgcgttgaatcagctgcgcgcctgggtcgatcacatcctggccaggcagatgttcggcgtgtttgtcactggacagtcgatgttcgacccgccgaccagctggtttcaaggccggttcgtggaccgccacctggccgattacggagactatgcggcaatctcagtggaactcgagaagctgaccaaatcgggccggccggttctcttcctcacgggggacgttcactggggccgggttatggcgggacgcagtcaggtcacgggccgccctgttgcctatgaagtgatctcctcgcctgcatctctggtgtcggcgattggcgccgaccagcttgccactctgggaagcggcatcgccgggctgttcggcaagaagaacaaatggcccaggcacagcgatccgaagaaagctccggaacacttcaagctgaacgaaacggtctgccattttgaaacgctccaaagacagaagggaaaccacctggcgacgctttcgttcaaccgaatcggcgaatccctgctctcgatggtccgctactgggagatcgatccggatcgaggctataccggcccgaccaatccagttctcttccatctgcggcccgaaacttag

SEQ ID NO: 702 - protein, 481 aa, Unknown
  Obtained from environmental sample
MKLTLYPRVATADCLRVWAAAFNAVSPPALHWKLNGKATAPSVVRPMESALPPNMLAGNRPRTFAGVFEFSGLDPDRHYNVECKSNGVREELESWTLPSQVPEGLNNWFHILLVSCFYGAQDKRGLAGFVANEIRQAIRPHLTLFLGDQVYLDLPTLQNLPNDMIRLAENFETKYVTNWGSPLGLARLLKAAPSAFLSDDHEYWNNFPHAATVVQHSWTEEGRRRWRLPASRLYEAFQLSAPAKSGAAVTVDVPPLSIFLADTRTFRDPDCRHSMQPGALNQLRAWVDHILARQMFGVFVTGQSMFDPPTSWFQGRFVDRHLADYGDYAAISVELEKLTKSGRPVLFLTGDVHWGRVMAGRSQVTGRPVAYEVISSPASLVSAIGADQLATLGSGIAGLFGKKNKWPRHSDPKKAPEHFKLNETVCHFETLQRQKGNHLATLSFNRIGESLLSMVRYWEIDPDRGYTGPTNPVLFHLRPET

SEQ ID NO: 703 - DNA, 1800 bp, Unknown
  Obtained from environmental sample
atgagacaatatcgtccctttagggagattgcagcggcacttgtagttctatcttttgcagtcaatacactaccggtacctccggctgaggctgaagctgacggccgaagaaagataggccttgttcttggcggcggcggggcgctcggaggcgcccacctcggcgtcctgaaggtgctcgaagagaacaggatacccgtagattatatagctggcaccagcatgggctctattgtcggcggcgcgtacgcggcgggcatgtctccggatgaaattgaggaactcctcaattccatagactgggccaacctttttaatgacaaaccatcccgcgaccagataccgttccgcgacaagtatgatacaaggaggctggccaattttgaagtgggtgttggcaaagaagggctcaagatgccccatggggcggtggctggacagaagctcgattttattttacaggaggtgaccgtaaggacaggcgcggtagacgattttgacaaacttcatatcccctaccgggcggtcgcgaccgacatcgagacgggagagtcggttacgctcaagaagggcaaccttgcggaggccataagagccagcatgtcggtgccgggcgccttctctcctgtcgagatagacggacgcgtgcttgtggacggcatggtggccaagaacgtgccggtggatgtcgcgaaagagatgggcgccgaggagatcatatgcatagatgtcggcggcgcgcttcccggccgcgataagctcgactcaaatttggctatcatgatgcagatgatcggcatcttcaccaaacagaacgtagattatcagaaaggtctccttaccgacaaggatatctttatagaggcgaacccgggagcggagtttaccgcggtagattttacccggcttcaggagataatagacgctggtgagaagatagccagagggcatatagaagaattgaagagatattcggtctccgaagaggagtataaggagttcattgccaggcagcggggcgcgctcaaagacgtagagatagattttgtaaaagtaggctctaccggccgcgtggagccgaggctcgtcaagtcaaaggtaaagacgaaggccggaaaagagctggactttaagacattggaagacgatctctcgcgaatctactctataggcgatttcgagaatgtgaatttctcgatcgcggaagagaagggagagaagggtctgttgatcgaaggaaaagagaaatcgtgggggcctcactatctttcgttcggcgcaaacatattagaaaatttcaagggcgacagctattatacactccttgcccagcaccagtggaggcaggtaaacaggcttggagccgattggaaaaacaggttcgccatgggaaaggaacttggctaccagacgctcttctatcagccgctagactattctgaaaggttctttatacagcccatggcacgggtagggcaggagtatatcgatgtctacagcgaccatgagaagataacggaatacgaggtgcaggatatggccggcgccttcgaggggggcgtcaatttcggcaacgaggcccaggcccgcggcggtatgttctggcgcggtcttactgcggagccgaatatcaagcggtttggtataccggaatacaaagatctctatgagaccggcgtacacggcaactttacttacgacagcatgaatagcgccaattttcccagagaaggcatgctggcctttgcggatatatattctccgctggaagcgcttgactgtgacgaagaccataactag

SEQ ID NO: 704 - protein, 599 aa, Unknown
  Obtained from environmental sample
  SIGNAL (1)...(31)
  DOMAIN (41)...(232): Patatin-like phospholipase
MRQYRPFREIAAALVVLSFAVNTLPVPPAEAEADGRRKIGLVLGGGGALGGAHLGVLKVLEENRIPVDYIAGTSMGSIVGGAYAAGMSPDEIEELLNSIDWANLFNDKPSRDQIPFRDKYDTRRLANFEVGVGKEGLKMPHGAVAGQKLDFILQEVTVRTGAVDDFDKLHIPYRAVATDIETGESVTLKKGNLAEAIRASMSVPGAFSPVEIDGRVLVDGMVAKNVPVDVAKEMGAEEIICIDVGGALPGRDKLDSNLAIMMQMIGIFTKQNVDYQKGLLTDKDIFIEANPGAEFTAVDFTRLQEIIDAGEKIARGHIEELKRYSVSEEEYKEFIARQRGALKDVEIDFVKVGSTGRVEPRLVKSKVKTKAGKELDFKTLEDDLSRIYSIGDFENVNFSIAEEKGEKGLLIEGKEKSWGPHYLSFGANILENFKGDSYYTLLAQHQWRQVNRLGADWKNRFAMGKELGYQTLFYQPLDYSERFFIQPMARVGQEYIDVYSDHEKITEYEVQDMAGAFEGGVNFGNEAQARGGMFWRGLTAEPNIKRFGIPEYKDLYETGVHGNFTYDSMNSANFPREGMLAFADIYSPLEALDCDEDHN

SEQ ID NO: 705 - DNA, 870 bp, Unknown
  Obtained from environmental sample
ttgcaacagctaagattctccttgcttttaaatttgttcagattcggattcttcttttcacttcttactctgctgggggggtgctctcctctaaagctggtcaacggattgaccccaaacggtgcgcaagaggttgaacgcaacctctcttacggggtggaggtgagacagaaacttgatgtctaccggcctgccaagccggatgagggcagccccgtggtagtttttttctatggcgggagctggcgcagcggagaaagaggtaattatgagtttgtcggccagagtttaagctcgcgtggttttattacggtaatacccgattaccggctttaccccgaggtgcgatttcctgcgtttgttgaggacggtgcccgggccttggcatggatacacgaaaatgtcagtgaagcggaacacggcctcgtcttgatcggccactccgccggcgcccatctggccgcattgctggcgcttgatcagaagtacctgaatgcttttagactttccagttctcaggtcaagggattgataggactggcgggaccctatgcttttgatcctttgtcttacagaaaaacgcgaccaatattcagtggactgaatgatgcagataacgccaggccggtatcctatgcctgcaataacagcccgcccctccttctcctgcatggtcgtgaagatcgcctggtacttccgggcaattcgaggaaattgcatgaactgcatcaggaatgcggaatgaagtctaactttatcgagcttagcgatgtggggcatttcgacatagttcttggtctctcagattcattctcaaatctggcgccagtcctcgggccgatccagcatttcattcaggaatcaatatag

SEQ ID NO: 706 - protein, 289 aa, Unknown
  Obtained from environmental sample
MQQLRFSLLLNLFRFGFFFSLLTLLGGCSPLKLVNGLTPNGAQEVERNLSYGVEVRQKLDVYRPAKPDEGSPVVVFFYGGSWRSGERGNYEFVGQSLSSRGFITVIPDYRLYPEVRFPAFVEDGARALAWIHENVSEAEHGLVLIGHSAGAHLAALLALDQKYLNAFRLSSSQVKGLIGLAGPYAFDPLSYRKTRPIFSGLNDADNARPVSYACNNSPPLLLLHGREDRLVLPGNSRKLHELHQECGMKSNFIELSDVGHFDIVLGLSDSFSNLAPVLGPIQHFIQESI

SEQ ID NO: 707 - DNA, 726 bp, Unknown
  Obtained from environmental sample
atggagtataaacgattaaggttcaggcaatactttgccgatcagtcaaacgggcattatggcggctatccccgcatcaatgttccgtataaaaaggttgaatacacctgccgccacggtcacaagcacgatgcttattactatatgtggtatgaaaaggcaagagatgtaattcaaatttatttcaaagaaacatcatcaaaatcgcaatggagagcgaactttaacttcccagacagctactacgataggtttcagtttgatgggaaagatattcaattaaaggttgctcaaggatggatggacttatattgcgctttaaaacacattattagagatgaatataaggttctaattgatgcttatggtgagaaagaagttgagattatcgggtggtcactcggatccgcaatagctcaattatgcgcacaagacttattcttcaattatggggttaaatcacacttatttacttatggtagtgttaaaccttgggccggcaaagatccggatatgcgagaatatcttggcaaatgcacaaaagagtgctataacttctatgaccataatgatattgtaggttatttaccaccattccataactactttgcgatgaatcattacaaggttcaccaggacaagtttaatatcttcaggttatttaacccgcagaagtatcacactgaatactggaagcctgaactttataaggacatcgaagaataa

SEQ ID NO: 708 - protein, 241 aa, Unknown
  Obtained from environmental sample
  DOMAIN (55)...(201): Lipase (class 3)
MEYKRLRFRQYFADQSNGHYGGYPRINVPYKKVEYTCRHGHKHDAYYYMWYEKARDVIQIYFKETSSKSQWRANFNFPDSYYDRFQFDGKDIQLKVAQGWMDLYCALKHIIRDEYKVLIDAYGEKEVEIIGWSLGSAIAQLCAQDLFFNYGVKSHLFTYGSVKPWAGKDPDMREYLGKCTKECYNFYDHNDIVGYLPPFHNYFAMNHYKVHQDKFNIFRLFNPQKYHTEYWKPELYKDIEE

SEQ ID NO: 709 - DNA, 636 bp, Unknown
  Obtained from environmental sample
atgaataaactgacaaaaaagctttccatgctggtgttgtttgcatcgctgttgttcgccggggcagcgaaggcgtgcaatgcagatcccattgtcttcattcatggttattcaggctggaagtcccagtttaataccatgatcaaccgtttccagaatgacggtacgcccgcctgtgcgatgtaccaattcggctacaacagcctgggcaagagcaaccgtaccagcgcccaggagctgagcgcgttcgttaataacattcgccccaatcataactggcgcagagcgaatatcgtcgcgcactccaacggtggcctggtcgcacgctggtatcgggtttttgaggggggctcatgggcaaccaaccgtttggttactctcggcaccccccataaaggcacctcctgggcctatggctgcttcagccccgcctgctttgaaatgcgttacaactcgtctttcctgcaacagttgaatgggcgcggctgtgatgtgtccctgtggtcagcggttgatcagatcatcatccctcagacaaatgcccagtgcggcaccagccgccggacatcctttgtgggtcacctgacgctgttgacctcgcagggcgtctataacgatgtaagacgttacctgtaa

SEQ ID NO: 710 - protein, 211 aa, Unknown
  Obtained from environmental sample
  SIGNAL (1)...(25)
  DOMAIN (28)...(209): Lipase (class 2)
MNKLTKKLSMLVLFASLLFAGAAKACNADPIVFIHGYSGWKSQFNTMINRFQNDGTPACAMYQFGYNSLGKSNRTSAQELSAFVNNIRPNHNWRRANIVAHSNGGLVARWYRVFEGGSWATNRLVTLGTPHKGTSWAYGCFSPACFEMRYNSSFLQQLNGRGCDVSLWSAVDQIIIPQTNAQCGTSRRTSFVGHLTLLTSQGVYNDVRRYL

SEQ ID NO: 711 - DNA, 1689 bp, Unknown
  Obtained from environmental sample
atgggattgttcgattacaaaaaagccgacggcaaagcgttgtacagcgatgccatcgcgctgacgctgtattcctacacgccgaccgggcagcctttgcccggcaccggttgggcgccactgggcgcctcggccctgggttatcaaggcaagaccgacgcaaaagggacgttcttcggcgagaaggacggcttcaccagcgccgaggcggaagtgctcggcaaatacgacgccgccggcaagctgatcggtatcggcgtggcctttcgcggcaccggcgggctgagttacagcgacaccttcggcgacatgaaaaacaacctgctggccgccatcgggccggtagattacgccaagaactacgcgaagaacgccttcgacaacctgctcaaatccgtggccgcgtttgctacggcccatggcatcgccgccaaggacgtgctgatcagcggccacagcctcggcggcctcggggtcaacagcgtggcggagctgagcgcgagcgactggggcgggttcttcaaggacgccaactacatttccttcgcctcgccgacccagagcagcaccggcaccaacgtgctgaacatcggcttcgagaacgatccggtgttccgtgtgctcgacggcaccacgttcagcacggcgtcgatgggcaaacacgacaagccgcacgactcgaccactgacaacatcgtcaacttcaacgaaaactacgcctctaccgcgcagaacctggtgccgttcagcatcgtcaacccgctgaactggtcggcccacagctcgctgggctatgccgatggtctgaaccgggtgatcgactcgaagttctataacctcaccagccaggactcgaccattatcgtgtccaatctggaagcctcgtcccggggcaagacctgggtcgaagatctgggccgcagcggcgagccgcataccggcagcaccttcatcatcggcaccgacagcaacgactggctcaagggcggggcgggcaacgacttcctcgaaggtcgtgccggcgatgacctgttccgcgatgacgggggcttcaacatcctgctcggtggtcagggccacaacaccttcgacctgcagaagccgttgcagaacttcagcttcgccaacgacggcgacggcacgctgtacgtgcgcgacgcctacggcggcatcagcgtgacccgcgacatcggcgcaatcgtgagcaaagagtccggttcgatgtggagcagcaaggaaatcacctggaccgtcaccgccaaaggcctggccaacggcgccgaactgacccagtacaaccattcgctcaacggcggcgcactcggcgacacgttgaaagccaccgctgacggcgactggctgttcggcctgggcggcgacgatcacctggtcagcgacaaggcccacgtgaccttcgtcggcggcgccggcaatgacgtgatgaatgcggtgggtggaaacaacaccttcctgttcagcggcgccttcggcttcgactcgatcaatggctaccagggcagcgacaaactggtgttcatgggcgtgcagggcgcggggcagggctacgactacaagcaacatgcttcgcagtccggcgccgataccgtgctgaagattggcgactatgccgtaaccctgatcggggtgggtgtggctaacctgtcggactcgagtttcgtgttcgcttga

SEQ ID NO: 712 - protein, 562 aa, Unknown
  Obtained from environmental sample
  DOMAIN (82)...(212): Lipase (class 3)
  DOMAIN (328)...(345): Hemolysin-type calcium-binding repeat (2 copies)
MGLFDYKKADGKALYSDAIALTLYSYTPTGQPLPGTGWAPLGASALGYQGKTDAKGTFFGEKDGFTSAEAEVLGKYDAAGKLIGIGVAFRGTGGLSYSDTFGDMKNNLLAAIGPVDYAKNYAKNAFDNLLKSVAAFATAHGIAAKDVLISGHSLGGLGVNSVAELSASDWGGFFKDANYISFASPTQSSTGTNVLNIGFENDPVFRVLDGTTFSTASMGKHDKPHDSTTDNIVNFNENYASTAQNLVPFSIVNPLNWSAHSSLGYADGLNRVIDSKFYNLTSQDSTIIVSNLEASSRGKTWVEDLGRSGEPHTGSTFIIGTDSNDWLKGGAGNDFLEGRAGDDLFRDDGGFNILLGGQGHNTFDLQKPLQNFSFANDGDGTLYVRDAYGGISVTRDIGAIVSKESGSMWSSKEITWTVTAKGLANGAELTQYNHSLNGGALGDTLKATADGDWLFGLGGDDHLVSDKAHVTFVGGAGNDVMNAVGGNNTFLFSGAFGFDSINGYQGSDKLVFMGVQGAGQGYDYKQHASQSGADTVLKIGDYAVTLIGVGVANLSDSSFVFA

SEQ ID NO: 713 - DNA, 771 bp, Unknown
  Obtained from environmental sample
atgatattcaaggccaagtttggggagcccaaaagaggatgggtagtgatagtgcacggcctgggagagcacagtgggaggtacgcgaagctcgttgagatgctagttgagaggggctttgcggtatatacattcgactggcctgggcatggaaagagttcagggaagagaggacacacaagtgttgaggaggcaatggagataattgacgaaattattgaggagatcggggaaaagccgttcctatttgggcacagcctaggcgggctaactgtcataaggtacgcagaaacaagggctgagaaggtgaggggagttattgcctcctcgccagctctagcaaagagcccaaacaccccaggattcctagttgcgttggcgaagttcttaggtgtggtggctccaggaattacgttttctaatgggatcaacccaagcttactctcaaggaacaaagatgcagtgaggaggtacgtagaggatcccttagttcacgacaaaatcacggcaaagcttggaaggagcatattcataaacatggagcttgcccatagggaggccgagaaaatcaaagtgccaatcctgctcttagtaggaacccaagacgtcataacgccccccgaaggagccagaaaattgtttgagaaacttaaagtcgaagacaaagagattagagaattcgagggagcttaccatgagatatttgaggatccggagtggggagaagaattccatagggtgatagtggagtggctggagaagcacagttaa

SEQ ID NO: 714 - protein, 256 aa, Unknown
  Obtained from environmental sample
  DOMAIN (40)...(250): alpha/beta hydrolase fold
MIFKAKFGEPKRGWVVIVHGLGEHSGRYAKLVEMLVERGFAVYTFDWPGHGKSSGKRGHTSVEEAMEIIDEIIEEIGEKPFLFGHSLGGLTVIRYAETRAEKVRGVIASSPALAKSPNTPGFLVALAKFLGVVAPGITFSNGINPSLLSRNKDAVRRYVEDPLVHDKITAKLGRSIFINMELAHREAEKIKVPILLLVGTQDVITPPEGARKLFEKLKVEDKEIREFEGAYHEIFEDPEWGEEFHRVIVEWLEKHS

SEQ ID NO: 715 - DNA, 603 bp, Unknown
  Obtained from environmental sample
atgaataacaagagcttcatcacaatccatggcattcgtaagtttggctcttctcccactcacatgcgccctataaacgaatcactcctctctagtaatctgaggacaatcccagtcaattatggctacaccctgctcccaatcacgaacagaaagagtgtttctagggcaattcctgtgctagaaaacgagctaaagcgagggagggacatcacccttatcgggtattctaacggcgcttggacagctctacagcttgcggaaatggcttatccaatccaacgtctagtgctcatctctcctgctcttcactctgctcacgccttccctcaaatcccttctcttgagcgtgtagacgtgttctattgccctacagataatgttggtgatcttgccaagacttggaggggagttactagaatcatgccttggagatggttctctccacacccttacggaagaatgatgaaaactggatttattggagaggatgaacgtgtctttaaccacaggcttggcgatcatgtaggccatgctttctacaaccatgctgatgctgtttcacacattatagaggtgattaaatatgaaactccttattag

SEQ ID NO: 716 - protein, 200 aa, Unknown
  Obtained from environmental sample
MNNKSFITIHGIRKFGSSPTHMRPINESLLSSNLRTIPVNYGYTLLPITNRKSVSRAIPVLENELKRGRDITLIGYSNGAWTALQLAEMAYPIQRLVLISPALHSAHAFPQIPSLERVDVFYCPTDNVGDLAKTWRGVTRIMPWRWFSPHPYGRMMKTGFIGEDERVFNHRLGDHVGHAFYNHADAVSHIIEVIKYETPY

SEQ ID NO: 717 - DNA, 717 bp, Unknown
  Obtained from environmental sample
atgatcttcccgcgtatgttcacgattcgtgtggtgtccatcgcggcggcgctggtgatcgccatcggctgcggcccggccgaacaggcgcaacggccgggggctcgggagctcgttccgccgacggccgcaccggaacggcaaccggatcgccccaggatcgtgttccttggagacagcttgagcgctggctacggactcgcacggcacgaatcggtgccggcgctgctgcaggcccggctggacgccgccgggtacgactacgaggtcgtgaatgccggcgtgtcgggcgacacctcggctggcggtctgagccggctcgactgggcgctggagggtccggtggacgtgctcgtcctcgaactgggcgccaatgacgggctgcgtgggctgccggtcgccaacatgaaacggaacctcgaagcgatcatcgtccgcgcggcccaacgggacatcaccgtggtgctcgccggcatggaggctccgccgaactacggcgaggcgtacacgtcggagttccggcaggcgttccacgatctggcgcgggcgcacgacctggcgttcatgccgttctttctggaaggggtggccggcgatccgcgcctgaatctggccgacggcatccatcccaatgcggccggcgcccgggtcgtcgagcgcaacgtctgggcggttctcgaaccgttgctcgcccaggacgacgagtcggcgcgatga

SEQ ID NO: 718 - protein, 238 aa, Unknown
  Obtained from environmental sample
  SIGNAL (1)...(29)
  DOMAIN (54)...(222): GDSL-like Lipase/Acylhydrolase
MIFPRMFTIRVVSIAAALVIAIGCGPAEQAQRPGARELVPPTAAPERQPDRPRIVFLGDSLSAGYGLARHESVPALLQARLDAAGYDYEVVNAGVSGDTSAGGLSRLDWALEGPVDVLVLELGANDGLRGLPVANMKRNLEAIIVRAAQRDITVVLAGMEAPPNYGEAYTSEFRQAFHDLARAHDLAFMPFFLEGVAGDPRLNLADGIHPNAAGARVVERNVWAVLEPLLAQDDESAR

SEQ ID NO: 719 - DNA, 1575 bp, Unknown; identical to SEQ ID NO: 109
  Obtained from environmental sample

SEQ ID NO: 720 - protein, 524 aa, Unknown; identical to SEQ ID NO: 110
  Obtained from environmental sample
  SIGNAL (1)...(20)
  DOMAIN (34)...(520): X-Pro dipeptidyl-peptidase (S15 family)

SEQ ID NO: 721 - DNA, 765 bp, Unknown
  Obtained from environmental sample
atgaaccaatctaaattcccaacagaagtaacactgtgcctctctggaggtgcagcacgtggagtgtaccaacttggtgctatttctgttctgcaagagcataatgtaaagataaaggcaatcagcggaacaagtataggtgcgcttataggtgctgcgctagggtgtcaaaaaagtgctgatgaaatctttgatatcatcagctctaaagagtttaaaagtgtgttcaagccgagttttggtaaaggctacttttttagacttgatgatagtgcaaaggtaattgacaagctcattgacagagcttcttttgaagagttgagcatccctttgacactctgtgtatgtgatgttaaagatgagtcggcaaaatattacaacagtggagtagacttcaaaaagctggtattggcatcatgctctattgcccctctttttaagcctgtggaattatatggcaggacttttgtcgatggcggtgtagtagataattttccagtggaacaattacaaagatatgactatccaatcataggaattaatttgcatccaaaatatagaaaaactccaagttctgtatttggctggttgaaaaaaaatatacatacggcttggcaaagccagtactatagaaaaagtaatctttgcgacatctacttgtgtaatgaagaactcaacaacgtaaaaatattctcttttaaagatttgcaaaaagcatatggattgggaaaaaaagatatgcacaatattatgcaagaggtttaa

SEQ ID NO: 722 - protein, 254 aa, Unknown
  Obtained from environmental sample
  DOMAIN (12)...(171): Patatin-like phospholipase
MNQSKFPTEVTLCLSGGAARGVYQLGAISVLQEHNVKIKAISGTSIGALIGAALGCQKSADEIFDIISSKEFKSVFKPSFGKGYFFRLDDSAKVIDKLIDRASFEELSIPLTLCVCDVKDESAKYYNSGVDFKKLVLASCSIAPLFKPVELYGRTFVDGGVVDNFPVEQLQRYDYPIIGINLHPKYRKTPSSVFGWLKKNIHTAWQSQYYRKSNLCDIYLCNEELNNVKIFSFKDLQKAYGLGKKDMHNIMQEV

SEQ ID NO: 723 - DNA, 936 bp, Unknown
  Obtained from environmental sample
gtgccggtcgacccgcacaccgccgccctgctcgccgtgctcgacgagtccggcgcgccgcccatgtacgaggggagccccgaggcggggcgcgccctgtacctgcagctcacccacggcgcccggacccccgagcagatcgtccctgtggcgagcaccgaggaccgcaccgtccccggcgccgagggcgaactccgggcgcgggtctaccggcccgagggcgaggggcccttcccgaccgtcgtcttcttccacggcggcggctgggtgatcggcgacctggacacccacgacaacatggcccgcaacgtctgccgggggtcccgcgccgtggtcgtcgcggtcgactaccgcctggcccctgagcacccgttccccgctgcggccgaggacgcggtggtcgcggcccgctgggtggcccagcacctggacgagttgggcggggacgaccggctcgcggtcgccggcgacagtgccggcggcaacctcgccgcggtggtggcccagcagctcaccgccgacggcaccccgctggccggacagttcctcatctaccccgccgtcgacgccgagggcgagtacccctcccgcgtgcagaacgccaagggctacttcctcgagaaggacacgatggactggttctacggccactacgccggagcctgggaggacgcgaaggacgcccggttgtccccgctgcacggcgccgacctctccggcctgcccccggcggtcatcgtcactgccgagtacgacccgctgcgcgacgagggcgaggcctacggcgacgcgctggaggccgccggggtccatgccgacgtacggcgatacgacggcctgatccacggcttcttcgacatggggacggtctcgcccacggcccaggccgccatcgacgagagctgcgcgcgcttcggggccctcatccggaagtga

SEQ ID NO: 724 - protein, 311 aa, Unknown
  Obtained from environmental sample
MPVDPHTAALLAVLDESGAPPMYEGSPEAGRALYLQLTHGARTPEQIVPVASTEDRTVPGAEGELRARVYRPEGEGPFPTVVFFHGGGWVIGDLDTHDNMARNVCRGSRAVVVAVDYRLAPEHPFPAAAEDAVVAARWVAQHLDELGGDDRLAVAGDSAGGNLAAVVAQQLTADGTPLAGQFLIYPAVDAEGEYPSRVQNAKGYFLEKDTMDWFYGHYAGAWEDAKDARLSPLHGADLSGLPPAVIVTAEYDPLRDEGEAYGDALEAAGVHADVRRYDGLIHGFFDMGTVSPTAQAAIDESCARFGALIRK

SEQ ID NO: 725 - DNA, 1263 bp, Unknown
  Obtained from environmental sample
atgcggacgacaactacaaattggagacaaatcgtgaaaagcctgaagctcttcctgatgggcctttgcctgttcatttccgcttcattcgcatcatctgcctatgcactgggcagttacacctacacgtacctgcgctgtttctatcgcgtcgatacatccccgctgaagcccaagaccacctacgtctggggcatcgatccgggcagcggcggctactaccgcatctatggccgctggtggaaagacggcttgctgagctgggaaaacatgttctacagcgacgtgtcgcaagatacgctgaaatcggtttgccagagcacgctcgccggctacggcatcaaccgcagcgtcgcactctcggcggcggccgatacgtcgctctcgctcaattacacggtgtggaccaacgacagcgcatcgcagggctcacgcatcaacaaaatcgtcgcattcggcgacagcctgtcggacaaccagaatctgtacaacgcgacccaatggcaactgccgaaccgcaacagttggtttctcggccgcttctcgaatgacaggaactggatcgaatacctgtcgagcaacgtgaatctgccgatgtacaactgggcagtggcgggcgcggcggcggatcagtactacgtcatcccgggtgtgtcgcaacaggtcgactcgtggatcacctacatgcagagcgcgccgaattaccaggccgcgaatacgctgttcaccgtgcttgtcggcggcaacgatctggtgaactacggccggtctgtcgactcgatcatctccgcggagcagcaggcgctggtgaagatgatcaatgccggcgctcgcaacatcctgttgctgaatctgcccgacgtatcgcgcgcaccggtattccagtatcgcagcgacgccgccaccatcgccgcgcaagtccgcgacttcaaccagaagctggcgcaactgcgcgacaatcttcaggcgacgtacggcccgtcgctcgtcattcgcatgttcgatacctacaccttgttcaacgatctgctgaacaatccgaccaactatggcgtgacgaacacctggcagtcctgcctcgacatcaactcggattccgggtcgaactatctttatacctggccgacgcgcgccgaatgcaccaacgccgacagcttcgtgttctgggacacgctgcacccgaccacgcatacgcacaagctgctgggcgacaatgcggcgaatttcgtacgcgccggtttccccgcattgtctgcgccttga

SEQ ID NO: 726 - protein, 420 aa, Unknown
  Obtained from environmental sample
  SIGNAL (1)...(36)
  DOMAIN (149)...(406): GDSL-like Lipase/Acylhydrolase
MRTTTTNWRQIVKSLKLFLMGLCLFISASFASSAYALGSYTYTYLRCFYRVDTSPLKPKTTYVWGIDPGSGGYYRIYGRWWKDGLLSWENMFYSDVSQDTLKSVCQSTLAGYGINRSVALSAAADTSLSLNYTVWTNDSASQGSRINKIVAFGDSLSDNQNLYNATQWQLPNRNSWFLGRFSNDRNWIEYLSSNVNLPMYNWAVAGAAADQYYVIPGVSQQVDSWITYMQSAPNYQAANTLFTVLVGGNDLVNYGRSVDSIISAEQQALVKMINAGARNILLLNLPDVSRAPVFQYRSDAATIAAQVRDFNQKLAQLRDNLQATYGPSLVIRMFDTYTLFNDLLNNPTNYGVTNTWQSCLDINSDSGSNYLYTWPTRAECTNADSFVFWDTLHPTTHTHKLLGDNAANFVRAGFPALSAP

SEQ ID NO: 727 - DNA, 948 bp, Unknown
  Obtained from environmental sample
atgagtcttcatcctcaagcaaaagctttgcttgcggtgcttgaatcgagcccgcctatcgaacagcaaaccgttgaagaagccaggcaagcatatgcgaaaatgtgcagttattttaataaacgtgaagatgtttatagagtagaagacaggcaaataaaaggattccagcagaatatttcgatacgcatctataccccagacgataaagccattcatccggcgctcgtttattttcatggcggcggctgggttatcggcgacttggaaacccatgatgccctttgccgttctttggcaaataaatctggagcggctgttgtttcagtggattatagcctttcacccgaatatagatttccagttgccatcgaagattcgtatctggcagttaaatgggtggcagatcatgcagaagagcttggaatcgacaaaaccatgattgccgttggcggtgacagtgcaggcggtaatctcgcgactgtcgtttgccatttagcgaatcaaagaaaagcccctgccatcagctatcaaatgctgttttacccttcaaccggatatgagcgaacaccgtctatcgataaatatggtgaaggttatcatcttacgaattcaacaatgaagtggtttcaacaacaatacttatcccaacctgaagacctgcgtaaccccttggccgcccctatgttactgtcagaatctgaaattgccttattaccgccagcttatgtcttaactgccgaatatgaccccctatgtgatggcggagaaatgtacgccaaaaaattggaacatgcgggagtagaagtaacatacgtctgctacccgggaatgatccatggcttcctgacgatgtcggagccgttggatgattgcaagcgagcgattaatgaagcggcacaaaacttgaaagcccattttacaaagacagttgccgtaaacgagtaa

SEQ ID NO: 728 - protein, 315 aa, Unknown
  Obtained from environmental sample
MSLHPQAKALLAVLESSPPIEQQTVEEARQAYAKMCSYFNKREDVYRVEDRQIKGFQQNISIRIYTPDDKAIHPALVYFHGGGWVIGDLETHDALCRSLANKSGAAVVSVDYSLSPEYRFPVAIEDSYLAVKWVADHAEELGIDKTMIAVGGDSAGGNLATVVCHLANQRKAPAISYQMLFYPSTGYERTPSIDKYGEGYHLTNSTMKWFQQQYLSQPEDLRNPLAAPMLLSESEIALLPPAYVLTAEYDPLCDGGEMYAKKLEHAGVEVTYVCYPGMIHGFLTMSEPLDDCKRAINEAAQNLKAHFTKTVAVNE

SEQ ID NO: 729 - DNA, 1350 bp, Unknown
  Obtained from environmental sample
atggcaacaacaatgcgcggagcaagcaagctcctggctggcatgaccctggcaatatcggccttgacggcaaccggcgaggctttcgccgccaacaatctgccgattgtgctggtacacggcttcctcggcttcggcccgaacgaaatgcaaggcaccggcttcaaatactggggcggtttcaacgatgtacaggcctacctcaaaaccaacaatggcagccaccaggtgcatgccgccgcggttggcccggtcagctcgaactgggatcgtgcggtcgagttgttctaccagatcaagggcggctgtgccgactacggtgccgcacgtaccgcccgctttgccgcgttcggcaagatccagaaaccggccggcaaatgctgggcgaccgatccgaacaacaacccgaacaactacccgctggcgctgtacccgcaatgggatgccgcacatccgatccatctggtgtcgcacagccagggcggccagaccatccgcacaatgatccagttgctggaaaacggctcgccttatggcaatgaaggtggcggcgccttgtataccggcggcaagatcggctgggtgaaaagtgccaccaccatttccactccgcacaacggcaccacgctgcgcgacgtgatcatcgactacgtgccgaaagtgtccgagctggccgggaaggcggttgaagtggccggtctgggcggcagcagcggccggatctacaacttcaagctggagcaattcggcctggcacaaggtccgtcggaaaacttccaggatttcatcaaccgcaccaagggcgcagcattctggaaactggaaaaccacgattcggcacagtgggatctgggcccggacggcgccaaagagctgaacagctgggtcaagacctcgccgaacgtgtattactactcgatcgccaaccatgccaccgaacagggcagcttctgctgcaatgaaaccgaccggctgatcgcgccgatccagagcagtgcctaccagtacgcccgcaacgacatgatcttcttcctcaagaacaccgctggcgaatgggttgtgccatcgatcctgcaggaaggcatgggctcctacacccagaccgacccgagccgggtactgatcgacagcaactggttcgtcagcgatggcgtggtcaactacatcagcatgaaatcgccgtcgggccagccggtacgcacctacaacggtacatcggtcaagggttactggaaccacctcggttattacaacaactacgaccacttcgacgtgatcggctggctgaactccagctcgaccgtctacccgatctacaactacctgaccggcattctctacggtctgtaa

SEQ ID NO: 730 - protein, 449 aa, Unknown
  Obtained from environmental sample
  SIGNAL (1)...(30)
MATTMRGASKLLAGMTLAISALTATGEAFAANNLPIVLVHGFLGFGPNEMQGTGFKYWGGFNDVQAYLKTNNGSHQVHAAAVGPVSSNWDRAVELFYQIKGGCADYGAARTARFAAFGKIQKPAGKCWATDPNNNPNNYPLALYPQWDAAHPIHLVSHSQGGQTIRTMIQLLENGSPYGNEGGGALYTGGKIGWVKSATTISTPHNGTTLRDVIIDYVPKVSELAGKAVEVAGLGGSSGRIYNFKLEQFGLAQGPSENFQDFINRTKGAAFWKLENHDSAQWDLGPDGAKELNSWVKTSPNVYYYSIANHATEQGSFCCNETDRLIAPIQSSAYQYARNDMIFFLKNTAGEWVVPSILQEGMGSYTQTDPSRVLIDSNWFVSDGVVNYISMKSPSGQPVRTYNGTSVKGYWNHLGYYNNYDHFDVIGWLNSSSTVYPIYNYLTGILYGL

SEQ ID NO: 731 - DNA, 1854 bp, Unknown
  Obtained from environmental sample
atgggtgtgtatgactacaagaatttcggtacggcggaatccaaggcgctgttcagcgacgccatggccattacgctgtattcctaccacaacctcgataacggctttgccgtcggttatcagcacaacggcttcggtctcggcctgccggccacgctggtgaccgcgctgatcggcggcacggattcccaaggcgtgatccccggcattccgtggaaccccgattcggaaaaagctgcactcgacgcggtgaaaaaagccggctggaccccgatcaccgcctcgcaactgggttacgagggcaagaccgatgagcgcggcaccttcttcggcgaaaaagccggctacaccagcgctcaggtggaaatcctcggcaaatacgacgctcagggccatctgacggaaatcggcatcgcctttcgcggcaccagcggcccacgggaaatcctgatcggcgactccatcggtgacgtgatcaacgacttgctcgccgcattcggacccaaggattacgccaagaactatgtcggcgaagcctttggcaacctgatgaacgatgtggtggccttcgccaaggccaacggcctgaccggcaaggacgtgctggtcagcggccacagcctcggcgggctggcggtcaacagcatggcggacttgagcaccagcaaatggggcgggttcttccaggattccaactacatcgcctatgcctccccaacccagagcagcaccgacaaggtgctcaacgtcggctacgaaaacgatccggtgttccgcgccctcgacggctcaaccttcaccggcgcctcgctcggcgtgcacgacgcgcccaaggagtcggcgaccgacaatatcgtcagcttcaacgaccactacgcctcggcggcgtggaacgtgctgccgttctcgatcgtcaacattccgacctggatctcgcacctgccgaccgcttatggcgacggcatgaaccgggtgatcgagtcgaagttctacgacctgaccagcaaggactcgacgatcatcgtcgccaacctgtcggatccggcgcgggccaacacttgggtgcaggacctgaaccgcaacgccgaaacccacaagggcagcacgttcatcatcggcagcgacgccaatgacctgatccagggcggcagcggcaacgattatctggagggccgcgccggcaacgacacgttccgtgacggcgggggctacaacatcctgctcggcggttcgggcaacaacactctggagttgcagaagtcggtcaatactttcgacttcgccaacgacggcgccggcaacctgtacatccgcgatgccaacggcgggatcagcatcacccgcgacatcggcagcatcgtcaccaaggaaccgggcttcctctggggcctgttcaaggacgacgtgacccacagcgtcacggcgaccggtcttaaggtcggcaacaacgtcacccagtacgaatcgagcgtgaagggcaccggcggcgccgacaccctcaaggccaaggccagcggtgactggctgttcggcctggaaggcaacgaccacctgatcggcggggcgggcaacgacgtattcgtcggcggcgccggcaatgatctgatggagtcgggcggcggggcggataccttcctgttcagcggcgcgttcggccaggatcgcgtggtgggttacaccgccaacgacaaactggtgttcctcggcgtgcagggcgtattgcccaacgacgacttccgcgcccatgccacggcggtggggcaggatacggtgctgaagttcggcgcggattcggtaacgctggtcggggttgcgttgaacagcctgagtgccgacgggatcgtgatcgcctga

SEQ ID NO: 732 - protein, 617 aa, Unknown
  Obtained from environmental sample
  DOMAIN (133)...(265): Lipase (class 3)
  DOMAIN (381)...(398): Hemolysin-type calcium-binding repeat (2 copies)
  DOMAIN (510)...(527): Hemolysin-type calcium-binding repeat (2 copies)
MGVYDYKNFGTAESKALFSDAMAITLYSYHNLDNGFAVGYQHNGFGLGLPATLVTALIGGTDSQGVIPGIPWNPDSEKAALDAVKKAGWTPITASQLGYEGKTDERGTFFGEKAGYTSAQVEILGKYDAQGHLTEIGIAFRGTSGPREILIGDSIGDVINDLLAAFGPKDYAKNYVGEAFGNLMNDVVAFAKANGLTGKDVLVSGHSLGGLAVNSMADLSTSKWGGFFQDSNYIAYASPTQSSTDKVLNVGYENDPVFRALDGSTFTGASLGVHDAPKESATDNIVSFNDHYASAAWNVLPFSIVNIPTWISHLPTAYGDGMNRVIESKFYDLTSKDSTIIVANLSDPARANTWVQDLNRNAETHKGSTFIIGSDANDLIQGGSGNDYLEGRAGNDTFRDGGGYNILLGGSGNNTLELQKSVNTFDFANDGAGNLYIRDANGGISITRDIGSIVTKEPGFLWGLFKDDVTHSVTATGLKVGNNVTQYESSVKGTGGADTLKAKASGDWLFGLEGNDHLIGGAGNDVFVGGAGNDLMESGGGADTFLFSGAFGQDRVVGYTANDKLVFLGVQGVLPNDDFRAHATAVGQDTVLKFGADSVTLVGVALNSLSADGIVIA

SEQ ID NO: 733 - DNA, 933 bp, Unknown
  Obtained from environmental sample
atgaaaaaaatactgataacaaagctgatggctattctgtttgccatctgcgccctgccagcccagacatgggcagcagggtatacggagacaaaatatcccattgtgttagtccacggtttattcggatttgacaacatcggcccggttgactactggtacggtattccatcggcactacgctcagacggcgcacgcgtgtatgtcacgcaagttgcagcggccaacagcacagaagtccgtggtgaacaattgctgacgcaggttaagcagattcttgcagtcaccggtgccagcaaagtgaatctgatcggtcacagccacggcggaccaacgatacgctatgtggcctcggtcaggccagatttggttgcgtcggtcacctcagtcggtggtgtgaaccggggctccgcggtggcagatatcattctgggcatcgcgccgccgggttccatcaccaacagcgtgcttgtctcggtaactaacggactggcaacaatcatcagtttcctgtcgggccagccaaatttatcgcaagatgcgctggcagcggcaaactccctcagcaccgctggttcgctcaaattcaacagcaaacatccgcaaggagtaccgaccactgcttgcggtgaaggcgcatataacgtcaacaacgttgcttactactcgtggagcggagcaaaaccgtacaccaatgttcttgatgtcgttgatccggccctctcactgacctcgctggcctttggcggcagcaaaaacgacggactggtcagcagttgttcctcccatctcggtaaggttattcgcgatgactacgcgatgaatcatcttgacgaagtgaatcagaccataggcctggtcaatatttttgaaacgaatccggtgacgatataccggcagcatgcaaatcgtctgaaaaatagcggcttgtaa

SEQ ID NO: 734 - protein, 310 aa, Unknown
  Obtained from environmental sample
  SIGNAL (1)...(25)
  DOMAIN (44)...(286): alpha/beta hydrolase fold
MKKILITKLMAILFAICALPAQTWAAGYTETKYPIVLVHGLFGFDNIGPVDYWYGIPSALRSDGARVYVTQVAAANSTEVRGEQLLTQVKQILAVTGASKVNLIGHSHGGPTIRYVASVRPDLVASVTSVGGVNRGSAVADIILGIAPPGSITNSVLVSVTNGLATIISFLSGQPNLSQDALAAANSLSTAGSLKFNSKHPQGVPTTACGEGAYNVNNVAYYSWSGAKPYTNVLDVVDPALSLTSLAFGGSKNDGLVSSCSSHLGKVIRDDYAMNHLDEVNQTIGLVNIFETNPVTIYRQHANRLKNSGL

SEQ ID NO: 735 - DNA, 1425 bp, Unknown
  Obtained from environmental sample
atgggtatctttgactataaaaacctcggtaccgaggactccaaggcgttgttcgccgatgccatggcgatcacgctgtattcctaccacaacctggataacggctttgccgtcggctaccagaacaatggcctcgggctggggttaccggccaccctggtcagcgccctgattggcggcagcaatgcccaaggggtcatccccgggatcccctggaaccccgactcggaaaaagccgcccttgaggcggtgcaagcagccggctggacgcccatcagcgccagtaccctgggctatagcggcaaggtcgatgcgcgcggcaccttctttggcgaaaaattcggctacggcacggcgcaggccgaggtgctgggcaagtacgatgacgctggcaagctgctggaaatcggcatcagtttccgcggcacttcagggcctcgggaaagcgtgatcactgactccatcggcgatgtgatcagcgacctgctcgccgccttcgggcccaaggattatgccaagaactacgcgggggaagcctttggcggcttgctcaagaacgtggcggacttcgccagcgcccagggcctgggcggcaatgacgtagtggtcagcggccacagtctgggcggcctggcggtcaacagcatggccgacttgagcgacagtacctggtcggggttctataaagacgccaattacgtggcctacgcatcgccgacccagagcgccggcgacaaggtgcttaacgtcggttatgaaaacgatccagtattccgagccctggatggctcgtcattcaacctgtcgtccctaggcgtgcacgacaaggcccacgaatcgagcaccgacaacattgtcagtttcaacgatcactacgcctcatccctgtggaacgtcctgccgttttccatcctcaacctgcccacttgggtttcgcacttgcccaccggttacggtgacggcatgacccgtatcctcgactcggggttctacgaacagatgacccgcgactccacggtgatcgtcgccaacctgtccgacccggcacgggccaccacctgggtgcaagacctcaaccgcaatgccgaggcgcacaagggcaataccttcatcatcggcagcgacggcgacgacttgatcaaaggcggcaggggcgcggactttatcgaaggtggcaagggcaatgacaccatccgcgacagcagtgggcacaacacgtttttgttcagcgggcagtttggcaatgaccgggtgatcggctaccaggcgacggacaagctggtgttcaacgacgtggcgggcagcaatgattaccgcgatcacatcaaggtggtgggcggggataccgtcattggctttgggacggattcggtgacgctggtgggtgtgagcagtctgtcgggggaggggatagtcatcagctaa

SEQ ID NO: 736 - protein, 474 aa, Unknown
  Obtained from environmental sample
  DOMAIN (133)...(265): Lipase (class 3)
MGIFDYKNLGTEDSKALFADAMAITLYSYHNLDNGFAVGYQNNGLGLGLPATLVSALIGGSNAQGVIPGIPWNPDSEKAALEAVQAAGWTPISASTLGYSGKVDARGTFFGEKFGYGTAQAEVLGKYDDAGKLLEIGISFRGTSGPRESVITDSIGDVISDLLAAFGPKDYAKNYAGEAFGGLLKNVADFASAQGLGGNDVVVSGHSLGGLAVNSMADLSDSTWSGFYKDANYVAYASPTQSAGDKVLNVGYENDPVFRALDGSSFNLSSLGVHDKAHESSTDNIVSFNDHYASSLWNVLPFSILNLPTWVSHLPTGYGDGMTRILDSGFYEQMTRDSTVIVANLSDPARATTWVQDLNRNAEAHKGNTFIIGSDGDDLIKGGRGADFIEGGKGNDTIRDSSGHNTFLFSGQFGNDRVIGYQATDKLVFNDVAGSNDYRDHIKVVGGDTVIGFGTDSVTLVGVSSLSGEGIVIS

SEQ ID NO: 737 - DNA, 852 bp, Unknown
  Obtained from environmental sample
atgagcgaccagcggaccgccctcgtgctcggcggcggcggcatcacgggcatcgcctgggagatcggcgtgctggccggcctggccgagctcggtgtcgacctcaccggcgccgacctcgtcgtgggcacgtcggcgggctcggtggtgggcgcccaggtgaccagcggcgctccgctggaggagatgtacgcccgccagctcgagccgccggcgcgggagaaggtggcccgcatgacgcggggcaacctggcccgctacgcgtgggcgatgctcaccagccgcgggcgcgacgtcgagttccggcgccggatcggagcgctggccctggccgccgagaaggccgggctgaccccgtcggagcaggagcggctcgacgtcatcggctcccggctggtgtcgaaggaatggccctcccgcgacctgacgatcaccgcggtcgacgccgccacgggggagttccgcaccttcgaccgcgggtccggggtgccactgctgcaggcggtggccgccagctgcgcggtgccgggcgtctacccgccggtcaccatcgacgggcgccgctacgtcgacggcggaatgcggtcggcggccaacgccgacctggcgaacgggtacgaccggctggtcgtcctggcgcccatcccgcgcggggtcggcccgctggccagcgtcgacgcgcaggtgtcgggcatggtgtcgcgcgtggccgtcgtggccccggaccaggccagccggacggccatcggccgcaacgtcctggaccccgccgcccgcgagcccgcggcgcgggccggccgggtccaggcggcgcaggcgctcacccgggtggcggaggtctgggccggctga

SEQ ID NO: 738 - protein, 283 aa, Unknown
  Obtained from environmental sample
  DOMAIN (8)...(204): Patatin-like phospholipase
MSDQRTALVLGGGGITGIAWEIGVLAGLAELGVDLTGADLVVGTSAGSVVGAQVTSGAPLEEMYARQLEPPAREKVARMTRGNLARYAWAMLTSRGRDVEFRRRIGALALAAEKAGLTPSEQERLDVIGSRLVSKEWPSRDLTITAVDAATGEFRTFDRGSGVPLLQAVAASCAVPGVYPPVTIDGRRYVDGGMRSAANADLANGYDRLVVLAPIPRGVGPLASVDAQVSGMVSRVAVVAPDQASRTAIGRNVLDPAAREPAARAGRVQAAQALTRVAEVWAG

SEQ ID NO: 739 - DNA, 759 bp, Unknown
  Obtained from environmental sample
gtgcgtttcgtcgattgcaagactgcgaattgctcgctgccggttcttgaagtcaacggcgaggtgggcgttctgttcgttcacggtttcacaggttcgccgcacgacttcacttacatggcgaagaggacctgcgaagctggcttcacggtctcaattccacgcttgcctggtcatggtacgtgcggtcaggacttcttgaccaccacggcacacgattggctccgtcgggcgttcgatgcctactacgatctgaaagcgatttgcaaggatgtgcacatagtcggtctgtccatgggtggagtcatagcgatcatcatggcgtctgttttgaagccaaaaaaactcgtgaccttggctgctgccacgcacctgagcagtaacagaataaaactcgctaagttcgtcgctctcttcagggacaaactcccaaagcaaaaatcgcagacgtatgaagatcctgccatggagactctcaacaaagagtattggtcctacgaatggcccaagcagggtgcagaactctacaagttgatcaagttgtcgaggaaggctgtgcggcaaatagtttctgaaacgctcgtggtcgcggcgcgcaacgatgaactggtgcctctgaaagctgcgcagttcatctacgataacgttcgctctgagaagagaaaactcttgatcttcgaaaagtcgggccacgtactttccaacgacgtggagaaagaagcggtcacagacgcagtcttggattggctgagatcttga

SEQ ID NO: 740 - protein, 252 aa, Unknown
  Obtained from environmental sample
MRFVDCKTANCSLPVLEVNGEVGVLFVHGFTGSPHDFTYMAKRTCEAGFTVSIPRLPGHGTCGQDFLTTTAHDWLRRAFDAYYDLKAICKDVHIVGLSMGGVIAIIMASVLKPKKLVTLAAATHLSSNRIKLAKFVALFRDKLPKQKSQTYEDPAMETLNKEYWSYEWPKQGAELYKLIKLSRKAVRQIVSETLVVAARNDELVPLKAAQFIYDNVRSEKRKLLIFEKSGHVLSNDVEKEAVTDAVLDWLRS

SEQ ID NO: 741 - DNA, 1014 bp, Unknown
  Obtained from environmental sample
atgaggcgaagaaccgcagggtttgacatccggatggacggccactatagtcgctttcaacatatagggacaggagatccggacatgcagcacacaagcaggcgaagcttcgttcagtcggccgcaatcgcgggcgtcgcggcggctttcggaccggagggagtcgaggctcggcagaccgctccggccggaataagggtggaaaatgacatcgttttcggaaagggcggcgacatggatctccgcctggacatctaccacccaaccgcgggaacttcaaagcggatggcggccattcacattcatggcgggggttttcaagccggcagcaaagccggtgtcgcgagctcgtcccgcgcgtttgccgaactcggttacgtcagtatcgcctcgcaataccgtttgaccgggcaaggccggtggccggcccagatcgaagatgtcaaagcggccatccgctggacccgcgccaacgcgacgcggctgaacatcgatgccgacaagattgcggtggccggttactcggcgggcggcctgatggcgctctttgccgcggccacgccggaccgcaaggagttcgagggcagtgggggcaatccaggcgtgagcacgaaggtttcggcctgcgtcgcgttttaccccgctacaacggccaacgcgaacctcctgccggaaggcagcgaccggacggcgatagatgccgcgtctcccatcaactacatctcggcgagcttcgctccgacgatctttctccacggggtcgaggacacgaccatccggcccgaaaacagtatggcgttcttcgagaagctccgggccgccggcgtcaaggtggacctgcacttgttccagggcgcgcctcacgctttcgaggtcaataatcccgacgccgcgctggcgtccgctcaggtcaccgacctgttcttcgatcggcttgttctcaacccaagggaatatccgccattcggcggaggacggggcggccgaggcggcgcacgcggcgggccacagtag

SEQ ID NO: 742 - protein, 337 aa, Unknown
  Obtained from environmental sample
  DOMAIN (103)...(312): Dienelactone hydrolase family
MRRRTAGFDIRMDGHYSRFQHIGTGDPDMQHTSRRSFVQSAAIAGVAAAFGPEGVEARQTAPAGIRVENDIVFGKGGDMDLRLDIYHPTAGTSKRMAAIHIHGGGFQAGSKAGVASSSRAFAELGYVSIASQYRLTGQGRWPAQIEDVKAAIRWTRANATRLNIDADKIAVAGYSAGGLMALFAAATPDRKEFEGSGGNPGVSTKVSACVAFYPATTANANLLPEGSDRTAIDAASPINYISASFAPTIFLHGVEDTTIRPENSMAFFEKLRAAGVKVDLHLFQGAPHAFEVNNPDAALASAQVTDLFFDRLVLNPREYPPFGGGRGGRGGARGGPQ

SEQ ID NO: 743 - DNA, 900 bp, Unknown
  Obtained from environmental sample
atgcccggagcccgtcgtctacgtgccgtcgtcgccgccgtcgcggtgaccgttcccctgaccctcaccgtcccggccgcgcaggccgcacccccgccgccggccgcccagccgtcgaccgcgctcaccgatgacctgctggtgatcggccaccggggagcgtcgggctaccggcccgagcacacgctggcggcctacgagctggcggcacggatgggtgccgactacatcgagcccgacgtggtgagcacgaaggacggcgtcctcgtggcccgccacgagaacgagatctccgggacgaccgacgtggcggcccggccggagttcgccgaacgccgcacgacgaagaccatcgacggcgtcgcgttcaccggatggttcaccgaggacttcaccttggccgagctgcgcaccctgcgggcggtggagcggctgcccatggtccgcgaggagaacaccctgtacgacgggctgtaccaggtgcccaccctcgacgaggtgctggagctgcgggcgcagctgtcccgggagctgcggcgcgacttgggcgtctacatcgagaccaagcacccgacgtacttcgacggaccgggctgtcgctggaggagccactgctggccgacctccgcgaggcgcacctggaccggaccggctccccggtcttcatccagtcgttcgagacggggaacctgcgtgaactggaccggaccggcgtgcgggccccgctcgtgcagttgctgtccgcgtccggcgccccgtacgacctcgtggtcgcgggcgacgcgcgcacgtacgccgacctgtccagcgctgcggggctgcaggagatcgccacctacgcggagggggtcgggccggacaagaaccaggtcatcccggtcgggcccgacggggcgctga

SEQ ID NO: 744 - protein, 299 aa, Unknown
  Obtained from environmental sample
  SIGNAL (1)...(29)
  DOMAIN (51)...(286): Glycerophosphoryl diester phosphodiesterase family
MPGARRLRAVVAAVAVTVPLTLTVPAAQAAPPPPAAQPSTALTDDLLVIGHRGASGYRPEHTLAAYELAARMGADYIEPDVVSTKDGVLVARHENEISGTTDVAARPEFAERRTTKTIDGVAFTGWFTEDFTLAELRTLRAVERLPMVREENTLYDGLYQVPTLDEVLELRAQLSRELRRDLGVYIETKHPTYFDGPGCRWRSHCWPTSARRTWTGPAPRSSSSRSRRGTCVNWTGPACGPRSCSCCPRPAPRTTSWSRATRARTPTCPALRGCRRSPPTRRGSGRTRTRSSRSGPTGR

SEQ ID NO: 745 - DNA, 747 bp, Unknown
  Obtained from environmental sample
atgaaaattagacaaccacaaccatttacatttgaagcaggaaaaagggccgttttattattgcatggatttacaggtcattcggcagatgtacgcatgcttggtcgctatttagaggaaaaaggttatacctctcatgcgccaatttatcgtggccatggtcttccacctgagcagctcatggaaacaaatccaaacatgtggtgggaggatgttgtacaagcatatgaacatttacgtcaactcggttatgaagaaatagcagtggccggcctatcgttaggtggaatgatggcattaaagttagcgacagagacaaaaataaaagctgttatatcgatgtgtgttcctatgatatttgatgataaaaataatttaacagagtcttttgagcgttttgtacgacaatataaacagtttgaaaaaaaggataaagcgacgattgatcatgaaacagaacaaataatggaacaatccgttgatttgtttgaggaaattaaagcatttaatttatcggttaaagaagtcattgatttgatttatgcaccaacacttgttatacaagcacgtaacgatgaggttattaatcctgaaagtgcacaatatatatatgattcagttgaaacagatgaaaaagaaataaagtggtatgaagaatcaggccatgttatcacattaggtgaagaacgcgaccaattacatgaagatatttatatgtttctcgaacagttagaatgggaacaataa

SEQ ID NO: 746 - protein, 248 aa, Unknown
  Obtained from environmental sample
MKIRQPQPFTFEAGKRAVLLLHGFTGHSADVRMLGRYLEEKGYTSHAPIYRGHGLPPEQLMETNPNMWWEDVVQAYEHLRQLGYEEIAVAGLSLGGMMALKLATETKIKAVISMCVPMIFDDKNNLTESFERFVRQYKQFEKKDKATIDHETEQIMEQSVDLFEEIKAFNLSVKEVIDLIYAPTLVIQARNDEVINPESAQYIYDSVETDEKEIKWYEESGHVITLGEERDQLHEDIYMFLEQLEWEQ

SEQ ID NO: 747 - DNA, 942 bp, Unknown
  Obtained from environmental sample
atgaagctcgacgacgaagccgccatggtgctggacctgatgaagaaatcgggccggccggcgctggagacgctcgacgcggcggcggcgcgcgcccaggccgacgggctgtcggagaaaagcgagatcgatccgccggaggtggcgaaggtcgtcgacggcacgctgcccggacccggcggcccgatccggttccgccgctactggccgatcggggccggcggcgcgaccctgccgacgctgatctactaccacggcggcggcttcgtgatcggcaatctggagacccacgactcgacctgcaggcggatcgccaatgtcagccagtgccaggtcgtcgccatcgactatcgcctcgcgcccgagcatcccttccccgcgccggtcgacgacgccatcgccgctttccgccacatcgccgccaatgccgcgcagttcgacacggaagccgatgcgctcgcggtcggcggcgattcggccggcggcaatctcgctgcggtgatctgccaggcgcagagggaaacgggcggccagatgccctcgttccagctgctgatctacccggccaccgacaaccgcaacgaaagcccgtcgcgacgcatgctgggcgacggctatttcctcaccacggcgctgatgaaatggttcttcgaccactacgcccccgcaggcgtcgatcgcaccgatccgcgcatctcgccgctgttcgccaaggactattccggcctgccgccggccttcgtgctgaccgccggtttcgatccgctgcgcgacgagggccgcgactacgccaaccggctgatcgacgcgggcgtcaaggtcacctattccaactatcccggcaccatccacggtttcttctcgatgacgcgtttcctcaagcagggcttgcgcgccaacgacgaggccgcctgcgcgctgaaggtgcatttcggcatctga

SEQ ID NO: 748 - protein, 313 aa, Unknown
  Obtained from environmental sample
MKLDDEAAMVLDLMKKSGRPALETLDAAAARAQADGLSEKSEIDPPEVAKVVDGTLPGPGGPIRFRRYWPIGAGGATLPTLIYYHGGGFVIGNLETHDSTCRRIANVSQCQVVAIDYRLAPEHPFPAPVDDAIAAFRHIAANAAQFDTEADALAVGGDSAGGNLAAVICQAQRETGGQMPSFQLLIYPATDNRNESPSRRMLGDGYFLTTALMKWFFDHYAPAGVDRTDPRISPLFAKDYSGLPPAFVLTAGFDPLRDEGRDYANRLIDAGVKVTYSNYPGTIHGFFSMTRFLKQGLRANDEAACALKVHFGI

SEQ ID NO: 749 - DNA, 804 bp, Unknown
  Obtained from environmental sample
gtggccaaagcgacacggcgcgccacgtcaatccccgcccgggccgccggagccgcgcttctcctcctcgcgttgaacgcgtctgtcctagctgccggctgcgccgacccgacttcgctcggcgtttcgagggtgctcacggtcgacacggccggcggcctcgaggttggcgccttcaatttcgccaagacgctgccgcttggcgacatggaggtcgtactcaccttcgacgacgggccgctgcccggcgtcaccgagcgcgtgctggcggcccttcgcgccgaatgcgccaaggctacctttttcgtcgtcggccggatggcggccgaggcgccacgtctggtgcaggccgagctcgccgacggccacacgatcggcaaccacacacagaaccacccgatgccgatcggacgcctgtctttcgaggccggcgcccgcgacatcgacgccggctttgccacgctcaagatggtgctcggccagccgcctgcgcccttcttccgctaccccggttttgccatgacggcgccgcttgaggcccgactcgctgccgccaatatcgggacgttcagcaccgacgtgatgggctatgactggcagacgatcacgcccgatcaggtccgccagaacgtccttgctgggctggctcgccgccgcggcggcatcatccttctccacgacatccaccgtcgcaccgccgacatgctgccgcagcttctccgggatctcaaagagcgcggcttcaggctcgtccacatccagccggcgcacccctgtccggccgacggctgccggatcgagtag

SEQ ID NO: 750 - protein, 267 aa, Unknown
  Obtained from environmental sample
  SIGNAL (1)...(31)
  DOMAIN (65)...(190): Polysaccharide deacetylase
MAKATRRATSIPARAAGAALLLLALNASVLAAGCADPTSLGVSRVLTVDTAGGLEVGAFNFAKTLPLGDMEVVLTFDDGPLPGVTERVLAALRAECAKATFFVVGRMAAEAPRLVQAELADGHTIGNHTQNHPMPIGRLSFEAGARDIDAGFATLKMVLGQPPAPFFRYPGFAMTAPLEARLAAANIGTFSTDVMGYDWQTITPDQVRQNVLAGLARRRGGIILLHDIHRRTADMLPQLLRDLKERGFRLVHIQPAHPCPADGCRIE

SEQ ID NO: 751 - DNA, 1407 bp, Unknown
  Obtained from environmental sample
atgcctcaagcctcttcccaggccagcaacgccttcaccgaaatcgacaccttccgccacctgtacgaccgcggcgacggtcaggtcaacggcaaaccgtcgttcaccgccgaccaggccgccgccgagatcctgcgcaagggcatgtcctggcaggacaagaacggcgacggcaagatcgacctcagctataccttcctgaccgacaagcctgccaactacaacccgaaactgggcaacttcggcgagttcagcgccctgcagaaagcccaggccgtgctcgccatgcaatcctgggccgacgtggccaacgtcaccttcaccgaaggcaacggcggcgacggccacatgacgttcggcaactacgacgtcagcaccggcggcgcggcgttcgcctacctgccccagggcagcagctacgacggccagtcgtggtacctgatcaacgaccagtaccaggtcaacaagactcccggcaccaacaactacgggcgccagaccctgacccacgaaatcggccacaccctcggcctgtcgcaccccggcgcctacaacgccggcaacggcaacccgacctacggtgacgccaagtacgccgaagacacccgcggctacagcctcatgagctactggagcgaaagcaacaccgcccagaacttcagcaaggacggcagcggcgcctacgcgtcggcgccgttgctggacgacatcgtggcggtgcagaaactctacggcgccaacctgcagacccgtgccgacgacaccgtctacggcttcaactccaacgccgagcgcgacttctacagcgccacctccaacagctccaaggtggtgttctcggtgtgggacggcggcggcaacgacaccctggacttctccggcttcagccacaaccagaagatcaacctcaatgaaggttcgttctccgacgtcggcggcctggtgggcaacgtgtccatcgcctatggcgtgaccctggagaacgccatcggcggttcgggcaacgacctgctgatcggcaacgcggcggccaacgaactggtgggcggagccggcaacgacctgatctacggcggtggcggcggcgacacgctgtggggcggggaaggggccgacaccttcgtgttcggcgcggccagcgactcgaccatgaccgcgccggactggatcatggatttcaccagcggcctggacaagatcgacctgtcgggcatcgccggcttcgccagcggcgcggccacgctgaacttcgtcagcggcttcaccggccatgcgggcgatgcgatcctcacctacttcgcgcagaccaaccagaccagcctgatgatcgacctgaccggccaaggttcggtggacttcgccgtgggcgtggtggggcaggcgctggcaagcgacatcgtcgcgtga

SEQ ID NO: 752 - protein, 468 aa, Unknown
  Obtained from environmental sample
MPQASSQASNAFTEIDTFRHLYDRGDGQVNGKPSFTADQAAAEILRKGMSWQDKNGDGKIDLSYTFLTDKPANYNPKLGNFGEFSALQKAQAVLAMQSWADVANVTFTEGNGGDGHMTFGNYDVSTGGAAFAYLPQGSSYDGQSWYLINDQYQVNKTPGTNNYGRQTLTHEIGHTLGLSHPGAYNAGNGNPTYGDAKYAEDTRGYSLMSYWSESNTAQNFSKDGSGAYASAPLLDDIVAVQKLYGANLQTRADDTVYGFNSNAERDFYSATSNSSKVVFSVWDGGGNDTLDFSGFSHNQKINLNEGSFSDVGGLVGNVSIAYGVTLENAIGGSGNDLLIGNAAANELVGGAGNDLIYGGGGGDTLWGGEGADTFVFGAASDSTMTAPDWIMDFTSGLDKIDLSGIAGFASGAATLNFVSGFTGHAGDAILTYFAQTNQTSLMIDLTGQGSVDFAVGVVGQALASDIVA

SEQ ID NO: 753 - DNA, 1623 bp, Unknown
  Obtained from environmental sample
atgcataagttcatatccatgggcgcgttttcagtagtagccattgcttgtagcagtttactcatgggatgccaaaacgaaatatccaatcagaagtccgcacaagttgatccgacaatggtaaaaacctccagtggccaggttaaaggttcgattgacggggaaatattatcgtttaaaggtataccatatgcgtttccgccggtgggggatctgcgctgggaggcgcctcaggcaatcacttggcaaggtgttcgctcagcgactgaatacggtaacgactgcatgcaagagccttttcccagtgacgcagcgcctcttggaactgagcctgcggaagattgcctggtcctgaatgtttggaaaaaggccaataataatgataaaccattgccggtggtggtgtggatctacggtggcggttttgttaacggaggttcttctcctgcggtatatgacggcagtgcgtttgccagtaaagatgtgatttttgtcagtttcaactaccgcctggggcgattcggtttcttcgcccatccagcgctgaccgctaaaaaagatggcctgttaggtaactacggttacatggatcaaatcgcagccatgaagtggattaatgacaatattgcagcttttggtggtgatcccaatgccattaccattatgggggaatcggcgggtggcttctcggtgattaacttgatgctcgcggagcaagctcgcggtctgttccagcgcgccattattatgtcgggtggcggccgaacccgagctaacgcagaccgcggtattgatactgcgccagaaggacaattgactgctgagcaagttggtattaattttgccaaggctaacggtattgaaggcacaggtcctgacgcattggctgcacttcgtgctttaagcgcagagcaagtgaccgatggtctcaatatggcttacttgtttatgcctaaggaaggtccagaaacctatgttggtggccctatcaaagacggcgaaatgatcaccgaagatataggtgttcgcatcgctaaaggcgatgctgtcaaggtccctgtattgatcggcactaccagtgcggatatcggtttcgccagtggcaataccaaagatgagttgtttgccagcttcggcgattatgccaacgaagcgcgccaggcatacgatcccaacggcgacctgtcactacaggagttgaagatgctggttggtagtgaccgctttatgaatgagccagcgcatttcgtatctcgcgagttaagccgtctgggccagccagtgtggctgtaccgtttttcctacgttgctgagagcatgcgtgacgaatggagtggggctcctcacgcaacagatatcccattttttctcgatactgtgaacgcgaaatacggtgaccagttgaccgcccaagaccgccatgcagcattcctggcgaatgaagctttcgttaattttgttaagaccggcaacccaaatccagcgggtgtagaagactggccgacttaccaaggccctcacggtccaatcatgaatttctctcacaaggccactgcggaggttattcacgatccttggcaggaacgcctttcggtagtgacccgcgctgctgatgaacaataa

SEQ ID NO: 754 - protein, 540 aa, Unknown
  Obtained from environmental sample
  SIGNAL (1)...(23)
  DOMAIN (13)...(529): Carboxylesterase
MHKFISMGAFSVVAIACSSLLMGCQNEISNQKSAQVDPTMVKTSSGQVKGSIDGEILSFKGIPYAFPPVGDLRWEAPQAITWQGVRSATEYGNDCMQEPFPSDAAPLGTEPAEDCLVLNVWKKANNNDKPLPVVVWIYGGGFVNGGSSPAVYDGSAFASKDVIFVSFNYRLGRFGFFAHPALTAKKDGLLGNYGYMDQIAAMKWINDNIAAFGGDPNAITIMGESAGGFSVINLMLAEQARGLFQRAIIMSGGGRTRANADRGIDTAPEGQLTAEQVGINFAKANGIEGTGPDALAALRALSAEQVTDGLNMAYLFMPKEGPETYVGGPIKDGEMITEDIGVRIAKGDAVKVPVLIGTTSADIGFASGNTKDELFASFGDYANEARQAYDPNGDLSLQELKMLVGSDRFMNEPAHFVSRELSRLGQPVWLYRFSYVAESMRDEWSGAPHATDIPFFLDTVNAKYGDQLTAQDRHAAFLANEAFVNFVKTGNPNPAGVEDWPTYQGPHGPIMNFSHKATAEVIHDPWQERLSVVTRAADEQ

SEQ ID NO: 755 - DNA, 1365 bp, Unknown
  Obtained from environmental sample
atgaaattgcaactcttaatacttttagtttttgtgatttctgttgttggagctactaaaatcagcgatcttggagaagtctatactgtgaaaactgcggacggagttacattgaaactcctgagatatcatccacccggagggcaaccaaacgttggagctcagccagttttgctattttctggattgctttgcaacatgaatgaatttgttgtattcacaccagatggacttgaaagcaagtacaaaccctactatcctaaggaacttgcagaatgggctaaagatgatctctacatagccaaagacccgatgctctactacagtctagcacactacttgtggaagaaaggttacgacgtatggctgctcaactatcgtggaactggtgtaggagagatgaaaagcggtgttggaaatgcaagagttagccttgacgtctgggccctttacgatgtccctgcagcgatcgattttgtaaataaaaagactggaaaaagtctaattattggcggccacagcacgggagggcttgtaacctatgtttatctccaaggagcaaaatttgtcaaaactccatcatgcctgataaatttggcttggtgtgaaaaagtttcggcatcagattcgcttgcaaaagaaagaaacagtaagatcgttggcgtcattgcaatcgacccagcaatgattcctcctttgcccaaaatacttgatacaaaagccggatggttgcttcttgacacaccgctttacatagacttgagggacacaattgagactttagcgaagaaaaaagggctgtgggaaagtttccttttgactgagaagtttttattcgaagctatatactcgctttactatcgctacggagagatatctgagataataaaagctctggctttcatgaatccgaacaacatgaatcctgctttgtcagacttcatgacaagatacgtagccgatagtctttacacacctacattagcccagtacgcagattttggtttaagaaatactgcaagagagtattttgaaaacggtgggaagggatatctggtcgttccaccatggcccaggcctggcgatggttactactattataaaggagagaatatgaaaaaagttaaagttccatatataactatcctctctgagcttccaggtttggttgatgcaaatcaaattataaaagacttgatgcaggctaaaacaaagcatcaactcgacagataccatataatctctggcacgggacacttagacgtagccttgggtctgaatgtcccgacagaagtctttccgaaaattggagcttggcttgatggtctgcaagaattaataggatacccaactactccgcattaa

SEQ ID NO: 756 - protein, 454 aa, Unknown
  Obtained from environmental sample
  SIGNAL (1)...(17)
MKLQLLILLVFVISVVGATKISDLGEVYTVKTADGVTLKLLRYHPPGGQPNVGAQPVLLFSGLLCNMNEFVVFTPDGLESKYKPYYPKELAEWAKDDLYIAKDPMLYYSLAHYLWKKGYDVWLLNYRGTGVGEMKSGVGNARVSLDVWALYDVPAAIDFVNKKTGKSLIIGGHSTGGLVTYVYLQGAKFVKTPSCLINLAWCEKVSASDSLAKERNSKIVGVIAIDPAMIPPLPKILDTKAGWLLLDTPLYIDLRDTIETLAKKKGLWESFLLTEKFLFEAIYSLYYRYGEISEIIKALAFMNPNNMNPALSDFMTRYVADSLYTPTLAQYADFGLRNTAREYFENGGKGYLVVPPWPRPGDGYYYYKGENMKKVKVPYITILSELPGLVDANQIIKDLMQAKTKHQLDRYHIISGTGHLDVALGLNVPTEVFPKIGAWLDGLQELIGYPTTPH

SEQ ID NO: 757 - DNA, 1257 bp, Unknown
  Obtained from environmental sample
atgcagggattcccgtttttcccggtggaattcgaccggcacgggcagccggtgaaccgggcgcaggcggcggaactggtggcgtggctggcggcggacggggcgggcgcgcaggccgtggcgttcgtgtcgcacgggtggaacaacaacatggaggaagcgcggtcgctttacgacaggctgctggggaatgtgcggcgccagggtgctccggcggggctggcggtggtggggttgttctggccctcgaagaagtttacggacgaatcgctgatcccgggaggggcggcgagcgtggaggaggcgggcgcggagtccgtgctggagcagacgctggatgcatggctggcggacgagaccgatccgaggtggcggcaagcgatggaagactgcaggcgcgaggttccgaagctggagagcgatccggcggtgcaggaccgttgggtggagcggctggcggggttgctggaccggcagggcgatgacgatttcgaggccgtcgcagacctgcgggcgaagccggggcgcgaggtcctggaggcgtttgcgccgccggtggtgtttgacctgccgccagaggaggagagcggggcggcgggagtgcgtgcgatggggctgggcagctttttggggggcatcacgggcggggcggcgaaattcctgaacctgtttacctattacgcgatgaaggaccgggcggggctggtgggcatggacggattgaatccgctgatgcggcaggtggcgagcgtgcgggccgggttgcggctgcacctggcggggcatagttttggggggcggctggtatcggctgcgctgcggcagggcggagtgaaggcgagttcgctgacgctgctgcaagccgcgttttcgcattacgggttcagcgacagagtgccggaaattggcggcaaagcgggctttttccggcccgcgttgaatcaggtggcggggccggtgctggtgacgcacacggcgaacgatctggccgtgggggtggcgtacgcggtggcgtcgcgggtggcgaaccaggtggcggcgggggtgggcgacgcgggggatccctatgggggcatcgggcggaacggagcgctgcgaacgccggaagcggtgagcgggcggctgctgcaggcggggcaggcgtacaccttcgagaaggggaaggtgcataacctggaggcgagtgcatttgtgcgggatcacggcgacgtaacgggcgcggaagtggcgtgggcgtgggtgaacgcgatgcgctga

SEQ ID NO: 758 - protein, 418 aa, Unknown
  Obtained from environmental sample
MQGFPFFPVEFDRHGQPVNRAQAAELVAWLAADGAGAQAVAFVSHGWNNNMEEARSLYDRLLGNVRRQGAPAGLAVVGLFWPSKKFTDESLIPGGAASVEEAGAESVLEQTLDAWLADETDPRWRQAMEDCRREVPKLESDPAVQDRWVERLAGLLDRQGDDDFEAVADLRAKPGREVLEAFAPPVVFDLPPEEESGAAGVRAMGLGSFLGGITGGAAKFLNLFTYYAMKDRAGLVGMDGLNPLMRQVASVRAGLRLHLAGHSFGGRLVSAALRQGGVKASSLTLLQAAFSHYGFSDRVPEIGGKAGFFRPALNQVAGPVLVTHTANDLAVGVAYAVASRVANQVAAGVGDAGDPYGGIGRNGALRTPEAVSGRLLQAGQAYTFEKGKVHNLEASAFVRDHGDVTGAEVAWAWVNAMR

SEQ ID NO: 759 - DNA, 885 bp, Unknown
  Obtained from environmental sample
atgaaaacaaccatacacccaaagctggagcgaacggatatcgtcctgatggatgacgtcgtctattctcagccgctggcgtattttggtagaagaccacacccgcttaagatgatgctcctccgcccgattgagtggtggggcgagacgcagctcctgccgcttccgacgatcctctgggtcgtgggcggcgcgtggcagcagacgtttccctcctggcgcatggcagagtttagttatttggcctatgcggggtatcaggtaacggcaatcgactaccgaacgatcaatgaagcggcgtttcccgcgcaagtggaggactgcaaagctgcggttcgcttcctccgcgcaaacgcaaaacgctatggcgtagatccggagcgcatcggcatcatgggcgactcggcgggcggctatctcgctgctatgatcggtgcaacgggagatgatcccgcgtttgaaaccgacgaatgggcgggatattccagcgcggtgcaggctgttgcggactggtatggccctatcgatatgctgcgtatggggcagtatgccaaggagcaaaacccggatgcgggagaagaggacacgctgctcttccgcctctttgcgggctgcccgatcacggaggagaaccataagtttcttgagagcatgagtccggagcgctatgtttcggcaaatacgccgccgcatctgattttgcacggcacggcggacgagatggttgatgtacgcgagagcgagcgttattacgaggcgctgacgaaggcgggcgtgcctgccgatttggttctgctcgaaggggcagggcattgcgaccaagcattttcacagccggaagtgcagaatatcatacttgagtttttcaccaaacatttaaagtaa

SEQ ID NO: 760 - protein, 294 aa, Unknown
  Obtained from environmental sample
MKTTIHPKLERTDIVLMDDVVYSQPLAYFGRRPHPLKMMLLRPIEWWGETQLLPLPTILWVVGGAWQQTFPSWRMAEFSYLAYAGYQVTAIDYRTINEAAFPAQVEDCKAAVRFLRANAKRYGVDPERIGIMGDSAGGYLAAMIGATGDDPAFETDEWAGYSSAVQAVADWYGPIDMLRMGQYAKEQNPDAGEEDTLLFRLFAGCPITEENHKFLESMSPERYVSANTPPHLILHGTADEMVDVRESERYYEALTKAGVPADLVLLEGAGHCDQAFSQPEVQNIILEFFTKHLK

SEQ ID NO: 761 - DNA, 606 bp, Unknown
  Obtained from environmental sample
atgaaggttaaacacgttattgttttacatggcttatatatgtctggcttggtgatgcgcccgttatgttcgcgtctagaagagtcgggggttaaagttttaaacttaacctacaatactcgagaccctaatcgagatgctatttttacgcaaatagatgagtttattagcaatgagccttctgctttagtgtgtcactctatggggggcttagttgctcgcgcctatttagaggcaaactcagcgccaagtcatcatgttgaaaaggtaatcaccttaggaacgccacatactggcagccatattgctgaaaaaatgcagcaaaaagggttcgagctattattaaaaaatagcgttgagtttttactctctaagaatggtgattggccttttaaagccaagctatatagcattgccggcgacttaccgattggcttaatgccactcattgtaaaaggcagccgctctgatggcactgtattgctagatgaaaccaagctaaagggtatggctgaacacaaggtgtttcatttaagccatacaagtatgatttactctcgccaagtcgttaattatattcttgagcgcttgaacgaggacatttaa

SEQ ID NO: 762 - protein, 201 aa, Unknown
  Obtained from environmental sample
MKVKHVIVLHGLYMSGLVMRPLCSRLEESGVKVLNLTYNTRDPNRDAIFTQIDEFISNEPSALVCHSMGGLVARAYLEANSAPSHHVEKVITLGTPHTGSHIAEKMQQKGFELLLKNSVEFLLSKNGDWPFKAKLYSIAGDLPIGLMPLIVKGSRSDGTVLLDETKLKGMAEHKVFHLSHTSMIYSRQVVNYILERLNEDI

SEQ ID NO: 763 - DNA, 1599 bp, Unknown
  Obtained from environmental sample
atggcactagccgaaccccattccgcgtggccgatcatctacgttcgcggctacgccatgacgcgtacggaaatcgacgaaacgacggcggatccgttctgcggattcaacatcggatccaccgttttgcgagccacgccggacaaaacgacggcgccgcgaaaactgatcttcgagtcgccgctggtgcgattgcagtccgacttcggctattgcgacgtttacgaggatggcgtcgacatcggcgatcccgatttcacggaagagatcgacaagaaatccgtcatcatctatcgctactacgacgatgcgtcgacgttgttcggcaccggcaaaacgcccgagatcgaggcatttgcgaaaggcctcggcgatctgatcctgcgcgtcagggagttggtctgccgtaacccggacaacaaagtcgcgacgaaggattttcgctgtcacctcgtggcgcactcgatgggcggcctggtgtgtcgggcgttcctccagaactcaaaactgggcgatgcgacagcgcgcaaatgtgtcgataagttcttcacctacgcgacgccgcacaacggcatcgaaatggcggggatcaacgtgcccgagttcctcgggctcaacgacatcaacaacttcaaccgcaatcgcatggccgagtacctggatctcgatgccacgttcaagaagaccaaacgcgtggactggattccggaagagtcgtttccgtcatcgcgcatcttctgcatggttggcacgaacaacggcgactacaacgtagcggcagggctgtcgcgcacgtttgccggcaacggcagcgacggcctcgtgcaagttgctaacgcttccgtttgggggatcaacgcgcagggtaagacctccgatccgtgcgcgacagcgtactgctttcgatcgcactcaggccggtatggcatcgtgaacagcgaagaggcgtaccagaacctcgtgcgttttctgttcggcgacgtccgcatcgatatgtgggccgacattcaaagcgcgcgggttccgcagcagctcgaggacaaggatgcagaggggaaggtcgatgcgctgtaccagttcgaggtgctcgcgtctccacgcggcaagcgttggtatctgacgcggcgaatcgccgaggaagactccgttgcgtgtcgggaccattcggtgctgaagaaggcgacggtcgcgaagccggaatcgatttacctttcgaccgtcttcctggccaatcgatatcgggtcaacaagaaactacgaacgctgtcgtactcgatgatgctcgcggtgcgcgcacctgactacgaagtggagaagcggttctggcccgaccggcactatgaaggcggatacctgtatcgcgacaccgtcgtgatcgagctgaagccgccggcgcgcgcgggaggcgagtggcaggtgctctacaactggcagagcaaagacgtcgcccaggcgacgattccgctcaccgtggaaaaactgagcgcgggcgcggtcgagatcgatattccattcgcgaccgccgatgagacgccgccgcgatcgccgggcgtgtcgggcaagttgcggttcgtcatttcgttgtggaatcgggagtga

SEQ ID NO: 764 - protein, 532 aa, Unknown
  Obtained from environmental sample
MALAEPHSAWPIIYVRGYAMTRTEIDETTADPFCGFNIGSTVLRATPDKTTAPRKLIFESPLVRLQSDFGYCDVYEDGVDIGDPDFTEEIDKKSVIIYRYYDDASTLFGTGKTPEIEAFAKGLGDLILRVRELVCRNPDNKVATKDFRCHLVAHSMGGLVCRAFLQNSKLGDATARKCVDKFFTYATPHNGIEMAGINVPEFLGLNDINNFNRNRMAEYLDLDATFKKTKRVDWIPEESFPSSRIFCMVGTNNGDYNVAAGLSRTFAGNGSDGLVQVANASVWGINAQGKTSDPCATAYCFRSHSGRYGIVNSEEAYQNLVRFLFGDVRIDMWADIQSARVPQQLEDKDAEGKVDALYQFEVLASPRGKRWYLTRRIAEEDSVACRDHSVLKKATVAKPESIYLSTVFLANRYRVNKKLRTLSYSMMLAVRAPDYEVEKRFWPDRHYEGGYLYRDTVVIELKPPARAGGEWQVLYNWQSKDVAQATIPLTVEKLSAGAVEIDIPFATADETPPRSPGVSGKLRFVISLWNRE

SEQ ID NO: 765 - DNA, 1260 bp, Unknown
  Obtained from environmental sample
atgcaccttgaaaccacccgatttttatccgccgggcagacccgcggtctcgcctccacctatggcaccccattgtatgtgtatgacgaaacgacgctccgtcagcgcgcggaagaaaccctggccttcccgaatgcctacggactcaccgtccgctacgccatgaaagccagtcctaaccgccgtattctgcgtattttcaatgaaatgggactccacatcgatgccagctccggacacgaagtcgcccgcgccatggccgccggaatcccggcaacgcacatttctctcagtgcgcaggagcttccggacaacctgggcgaactcctggaccagggcatgctcttcaatgccaccagcctcaatcaaattcgaaccgcgggcgaaatccgtcccggcatccaaatcggtctgcggtttaaccccggtctcggttccggcggcaccaaccgcaccaacgtcggtggacctgccagctccttcggcatctggcatgagtacgcgccccaggccgccgacctgctggagcattaccgcctgacctgcgtgcggattcatacccacatcggcagcggcagcgatccctccgtctggcagcgcgccgccctcctcagcctcgaacaggtgcggcgctttcccgatgtgcacaccctggatatgggcggcggctttaaggtcgcccgcatgcgttctgaaaaatccacagacctccaggaggtcggggcccccgttcgtgccgcctttgaggactttgccgccgagaccggacggaaactgcatctcgaaatcgaacccggcacctacctggtggccaatgccgcctccatcatcagccgcgtacaggatgtgatcgacaccggggaagacggctatctcttttaccgcctcgacaccggcatgaccgacgtcctccgcccctccctttatggtgcgcagcatccgctggtggtcataccccgcaccgatgatcgcgactgtcccgaggtggaggtgattctcgttggccactgctgcgaatccggcgatatccttaccccggcacccggtgatcccgaggcactcgccccgaggactattcgcctggcggaagtcggcgattatgtggtcattgaaggcgtcggcgcctactgctcttccatgagcacccgaaactacaactcctttccggccagtccggaagtcctgctcacccctcacggcgaaaccgaactcattcgcaaacgtcaacccctcgaagatatttgggcactggaaatgtaa

SEQ ID NO: 766 - protein, 419 aa, Unknown
  Obtained from environmental sample
  DOMAIN (275)...(397): Pyridoxal-dependent decarboxylase, C-terminal sheet domain
  DOMAIN (29)...(272): Pyridoxal-dependent decarboxylase, pyridoxal binding domain
MHLETTRFLSAGQTRGLASTYGTPLYVYDETTLRQRAEETLAFPNAYGLTVRYAMKASPNRRILRIFNEMGLHIDASSGHEVARAMAAGIPATHISLSAQELPDNLGELLDQGMLFNATSLNQIRTAGEIRPGIQIGLRFNPGLGSGGTNRTNVGGPASSFGIWHEYAPQAADLLEHYRLTCVRIHTHIGSGSDPSVWQRAALLSLEQVRRFPDVHTLDMGGGFKVARMRSEKSTDLQEVGAPVRAAFEDFAAETGRKLHLEIEPGTYLVANAASIISRVQDVIDTGEDGYLFYRLDTGMTDVLRPSLYGAQHPLVVIPRTDDRDCPEVEVILVGHCCESGDILTPAPGDPEALAPRTIRLAEVGDYVVIEGVGAYCSSMSTRNYNSFPASPEVLLTPHGETELIRKRQPLEDIWALEM

SEQ ID NO: 767 - DNA, 744 bp, Unknown
  Obtained from environmental sample
atgagattagaaagcagtaattttaatttagttttaagtggtggagcagcgcttggctatgcacatattggagtgtgtgagtttttagatgaatacagtcttactcctaaaaactattatggggtaagtatgggcgcaattgtagcttcaattgaagccttggcactaactcttaaagagaaaaaacaaatctataaagatattagaaatatatttaagtggcttagttttaatctaagcggctctttaattagctttagaaagatagagaaaatagtagatgctatttttggttctttgcgctttagcgatttagagagagcactctatattggtgcaacagactataagaatggtgaatatgttactttttctaaagataataatactcttattaaagaggcacttttagcctctatggctgtgccagctcttttttctcctaaagagattgaaaaaagagtctatgtagatggctatattagttcaaacttgcctttatcttcaataaagaatgattatgtcaatctcattgtcaatgtaacaggaaaaaactcttttaaaaaactctcacgttcaaagcttcttaagctctctctttttagaaatttagagcgaagtattagaattttaatgtataatcaaacaaaaatggctctagaacagttctctaaagagtatattctcttagagcctaagctctcttcatataaaactacacatttttataaatttctcaaataa

SEQ ID NO: 768 - protein, 247 aa, Unknown
  Obtained from environmental sample
  DOMAIN (10)...(171): Patatin-like phospholipase
MRLESSNFNLVLSGGAALGYAHIGVCEFLDEYSLTPKNYYGVSMGAIVASIEALALTLKEKKQIYKDIRNIFKWLSFNLSGSLISFRKIEKIVDAIFGSLRFSDLERALYIGATDYKNGEYVTFSKDNNTLIKEALLASMAVPALFSPKEIEKRVYVDGYISSNLPLSSIKNDYVNLIVNVTGKNSFKKLSRSKLLKLSLFRNLERSIRILMYNQTKMALEQFSKEYILLEPKLSSYKTTHFYKFLK

SEQ ID NO: 769 - DNA, 1431 bp, Unknown
  Obtained from environmental sample
atgggtgttttcgactataaaaacctcgggaccgagggttccaaagcgttgttcgccgatgccatggcgatcacgctgtactcctaccacaacctggacaacggctttgccgtgggttatcagcacaacggttttggcctggggctgccggccacgctggtgggtgcgttgctgggcagcactgactcgcagggggtgattccggggattccctggaaccctgactcggaaaaggccgcccttgaggcggtcaacaaagccggctggacgcccatcagcgccagtaccttgggctatggcggcaaggtggatgcccggggcacgttcttcggtgaaaaggccggctacaccaccgcgcaggtggaggtgctgggcaagtacgatggtgacggcaaactgctggaaatcggtattggttttcgcgggacttcggggcctcgggaaaccttgatcaccgactccattggcgatctggtcagtgatttgctggcagcgctggggcccaaggattacgcgaaaaactacgccggcgaagcctttggcaccttgctcaaggatgtcgcggcgtatgccggcagtcatggcctgacgggcaaggatgtggtggtcagcggccatagcctgggcggcctggcggtcaacagcatggccgacttgagcggcaataaatggtcggggttctacaaggactccaactatgtggcctatgcctcgccaacccagagcagcggcgacaaggtgctgaatatcggttatgaaaacgacccggtgtttcgcgcgctggacggctcgtcgttcaacttctcgtccctgggcgtgcatgacaagccccatgagtcgacgacggacaatatcgtcaacttcaacgaccactacgcgtcgacgctgtggaatgtcctgccgttttccatcgtcaatgtgcccacctggctttctcatttgcccacggcctatggcgatggcttgacccgggtcctggactcgaaattctacgacctgaccagccgggactcgacgattatcgtggccaacctttcggacccggcccgggccaatacctgggtgcaggacctcaaccgcaatgccgagccgcacaagggcaacacgttcattatcggcagtgatggtgatgacctgattcaggggggcaagggtgtggatttcatcgagggcggcaagggcaatgacacgatccgcgacaacagcgggcataacacctttctgttcggcgggcagtttgggcaggaccgggtgattggttatcagccgactgacaagctggtgttccgggacgtggagggcagtgcggactggcgtgaccatgccaaagtggtggggggcgatacggtgctgagttttggcgcggattcggtgacgctggtcggcgttggactcgccggcgtttggggcgatggaatttccatcagctaa

SEQ ID NO: 770 - protein, 476 aa, Unknown
  Obtained from environmental sample
  DOMAIN (133)...(265): Lipase (class 3)
MGVFDYKNLGTEGSKALFADAMAITLYSYHNLDNGFAVGYQHNGFGLGLPATLVGALLGSTDSQGVIPGIPWNPDSEKAALEAVNKAGWTPISASTLGYGGKVDARGTFFGEKAGYTTAQVEVLGKYDGDGKLLEIGIGFRGTSGPRETLITDSIGDLVSDLLAALGPKDYAKNYAGEAFGTLLKDVAAYAGSHGLTGKDVVVSGHSLGGLAVNSMADLSGNKWSGFYKDSNYVAYASPTQSSGDKVLNIGYENDPVFRALDGSSFNFSSLGVHDKPHESTTDNIVNFNDHYASTLWNVLPFSIVNVPTWLSHLPTAYGDGLTRVLDSKFYDLTSRDSTIIVANLSDPARANTWVQDLNRNAEPHKGNTFIIGSDGDDLIQGGKGVDFIEGGKGNDTIRDNSGHNTFLFGGQFGQDRVIGYQPTDKLVFRDVEGSADWRDHAKVVGGDTVLSFGADSVTLVGVGLAGVWGDGISIS

SEQ ID NO: 771 - DNA, 1038 bp, Unknown
  Obtained from environmental sample
atgacaacccaatttagaaacttgatatttgaaggcggcggtgtaaaaggtgttgcttacattggcgccatgcagattctcgaaaatcgtggcgtgttgcaagatattcaccgagtcggagggtgcagtgcgggtgcgattaatgcgctgatttttgcgctgggttacacggttcgtgagcaaaaagagatcttacaagccaccgattttaaccagtttatggataactcttggggtgttattcgtgatattcgcaggcttgctcgagactttggctggaataagggtgatttctttagtagctggataggtgatttgattcatcgtcgtttggggaatcgccgagcgacgttcaaagatctgcaaaatgccaagcttcctgatctttatgtcatcggtactaatctgtctacagggtttgcagaggttttttctgccgaaagacaccccgatatggagctggcgacagcggtgcgtatctccatgtcgataccgctgttctttgcagccgtgcgtcacggtgatcgacaagatgtgtatgtcgatgggggtgttcaacttaactatccgattaaactgtttgatcgggagcgttacattgatctggccaaagatcccggtgctgttcggcgaacgggttattacaacaaagaaaacgctcgctttcagcttgagcggcccggtcatagcccctatgtttacaatcgccagaccttgggtttgcgtcttgatagtcgcgagcagatagggctctttcgttatgacgaacccctcaagggcaaacccattaagtccttcactgactacgctcgacaacttttcggtgcgttgatgaatgcacaggaaaagattcatctacatggcgatgattggcaacgcacggtctatatcgatacattggatgtgggtacgacggacttcaatctttctgatgcaactaagcaagcactgattgagcaaggaattaacggcaccgaaaattatttcgagtggtttgataatccgttagagaagcccgtgaatagagtggagtcatag

SEQ ID NO: 772 - protein, 345 aa, Unknown
  Obtained from environmental sample
  DOMAIN (8)...(195): Patatin-like phospholipase
MTTQFRNLIFEGGGVKGVAYIGAMQILENRGVLQDIHRVGGCSAGAINALIFALGYTVREQKEILQATDFNQFMDNSWGVIRDIRRLARDFGWNKGDFFSSWIGDLIHRRLGNRRATFKDLQNAKLPDLYVIGTNLSTGFAEVFSAERHPDMELATAVRISMSIPLFFAAVRHGDRQDVYVDGGVQLNYPIKLFDRERYIDLAKDPGAVRRTGYYNKENARFQLERPGHSPYVYNRQTLGLRLDSREQIGLFRYDEPLKGKPIKSFTDYARQLFGALMNAQEKIHLHGDDWQRTVYIDTLDVGTTDFNLSDATKQALIEQGINGTENYFEWFDNPLEKPVNRVES

SEQ ID NO: 773 - DNA, 1569 bp, Unknown
  Obtained from environmental sample
atgtgtcgaacatttctgacggcgatcgtctcgctgttcttcgcttcgacgatcttcgccgctcctgatcgcgtaagagttgatggtggagtgattgaaggcgttggtaggcagccatccggcgtgcgcgttttcagaggcattccgtacgcgcagccgcctgtgggcgatttgcgctggcgagagccgcagcccgtcaaaaagtggaccggcgtccgtcaggctgtgaaattcgggccgcgctgcatgcagccatcgatcttcagcgacatgatcttccgctcggacggcatgagcgaagattgcctttatttgaacgtctggacgccggccaagtcatccgccgagcgtttgccagtactcgtttacttttacggtggcggctttgtcgccggtgacggatcagaaccgcgctatgacggcgaaagcatggcggcgaaggggatcgtggtggttacggtgaactatcggcttggggtgtttggctttctggtccatcccgaattgacgaaggagtcgccgcacaaatcttccggcaattacggtttgctcgatcagagtgcggctttacgttgggtgaggcgcaacatcgccgctttcggtggcgacccgcatcgtgtgacgattgcgggcgaatcagccggttcggcatcggtcagcgcgcagatggcttcgcccttatcgagagggttgatcgccggcgcgatcggtgagagcggttctatcttgtggacgcttcgggcggtgccgcttgcgcaggctgagcaagcgggcgtcaagtttgccgccagtctcggcctttcgtcgcttgccgagttgcgtgcgatgagggcgcagcagcttctcgaggcggcgacgaaggaggggatggctgggatcgggcgtttcccgatcgcgatcgacggatatttcttcaccgagccacccgctgcgacatacgaagctggtcgacaggctcgcgtgccgcttttagtcggttggaactcggaagagatggggtgggccgcgctgttacgcgggcgagagccgactccggagaattacgcgcaggcggtgcgtgagctttatggggaccgcgccgatgaagtgctgaagttgtatccggcttcgacgcgcgaggaggtgattgcggcggcgaccgatttagccagcgatcggttcatcggctacggcacgtggaagtgggccgacttgcacagccggacgagcggacagcccgtataccgctacttttatacgcatccgcgtccgcgcgggaggatggccggcgcggggccgccagcgcgcggggcgatccattcggcggagatcgagtatgcgttaggcaacctgacggtcaacaacgtctatgaatggacacctgatgactacaaggtatcgaaagtgatgcaggaatatttcgccaatttcatcaagcgcggggatccgaatgggccggggttgcccgtctggccggcgatcaagggtggcggtccggtccaggtgatgcggctcgatgtcgagccgcgcgttgagccggagcgaaaccgcgcgcgctatctgttgctggaccagttggcggagaggtga

SEQ ID NO: 774 - protein, 522 aa, Unknown
  Obtained from environmental sample
  SIGNAL (1)...(20)
  DOMAIN (1)...(514): Carboxylesterase
MCRTFLTAIVSLFFASTIFAAPDRVRVDGGVIEGVGRQPSGVRVFRGIPYAQPPVGDLRWREPQPVKKWTGVRQAVKFGPRCMQPSIFSDMIFRSDGMSEDCLYLNVWTPAKSSAERLPVLVYFYGGGFVAGDGSEPRYDGESMAAKGIVVVTVNYRLGVFGFLVHPELTKESPHKSSGNYGLLDQSAALRWVRRNIAAFGGDPHRVTIAGESAGSASVSAQMASPLSRGLIAGAIGESGSILWTLRAVPLAQAEQAGVKFAASLGLSSLAELRAMRAQQLLEAATKEGMAGIGRFPIAIDGYFFTEPPAATYEAGRQARVPLLVGWNSEEMGWAALLRGREPTPENYAQAVRELYGDRADEVLKLYPASTREEVIAAATDLASDRFIGYGTWKWADLHSRTSGQPVYRYFYTHPRPRGRMAGAGPPARGAIHSAEIEYALGNLTVNNVYEWTPDDYKVSKVMQEYFANFIKRGDPNGPGLPVWPAIKGGGPVQVMRLDVEPRVEPERNRARYLLLDQLAER

SEQ ID NO: 775 - DNA, 450 bp, Unknown
  Obtained from environmental sample
atgacgctgttgtccgacaaagccatgcacacggggatcgccgggcgaatcccggtggttccccccctgccggcggacgtcgaattcatcctctccgcgctggaggccggtcgccacagcggcccgagtcgccgcaagcacgagcgccgcccctaccgcgtcgccgcccggctcaagctcttcagcgatgactcgaaggccgagccctggacgatctacacccgcgacgccagccaccagggcctcggcttcgtgacccgccaccgtctgccactgggctacggcggcatcgtgaccctgaccaacccccagggcaaggacgtgcagatcgactgcaccctgctccggtgtcgcgaggccgtgacggggtggttcgagggctcgctctacttcaatcgcgagcagcccggcttccaccccgacttcctcgaagtcgcgcatcacacctaa

SEQ ID NO: 776 - protein, 149 aa, Unknown
  Obtained from environmental sample
MTLLSDKAMHTGIAGRIPVVPPLPADVEFILSALEAGRHSGPSRRKHERRPYRVAARLKLFSDDSKAEPWTIYTRDASHQGLGFVTRHRLPLGYGGIVTLTNPQGKDVQIDCTLLRCREAVTGWFEGSLYFNREQPGFHPDFLEVAHHT

SEQ ID NO: 777 - DNA, 1116 bp, Unknown
  Obtained from environmental sample
atggctacatatatcgttacattagaagagggtcaaacaagagattgcctactaggttgtggcaaagtaggtaagccgcaatctgtacctgaatgcgttattgttgacaccctgcttactaagcaaacactagagggtatagatggcgttgtcagtgtaatagaggatcatcctgtgcagcctgaagaagcacgtcctactaataataactggttcctagaccgtatccacaaccaacagtcacgcagcaacacaacatacataccaacccgttcgggcaagggggtatgtatctatatcgtagatgatggtatgagagaatcacacagagatttctcaggacgtgtagcacaaacgattagaaatgtggacggtgtgtcaagggcacatggtactttggttgcaagttgtgcagcagggtctttatttggggcagcctttgaagcagaaatctatatggctgaaacattgtggacgtatgcagatacaattaaagctatggatgcttgtattgaccactatatccaaaatggacgtaaaccttccgtgttgaatttatcattcacatcaatgtcctccgcaggatatagagtagttatagacagagcttttagtgagggtatgactgttgtagcagcagcaggcaaccataacgacgattccctaaaaagattccctgcaaatcttgataacgtaatatcagtaggatgcttgactaaagatatggtaagagcttcttacagtaactacggagaactggtggatatatgggcacctggacacgatggaagagcggcgtcagccgtagataacaactcagcgagaatggccacaggcacttcatccgctgcacctgttatagctggtgtctgtgcaatgattcttgaagggaaccctaacctgacgaacgtagaggttcgtaaagaacttatgacaaatggttcattaccctttgcactaggtcgagttggatacgctcaagttacaaatacagcacctcttcccgaaccagaaccttgccctgaaccagagcctattgatacgtcagcaatagaacaagcattagcagattttaatgctgcaatgcaaaccttcatctctagtttgaataagtga

SEQ ID NO: 778 - protein, 371 aa, Unknown
  Obtained from environmental sample
  DOMAIN (71)...(328): Subtilase family
MATYIVTLEEGQTRDCLLGCGKVGKPQSVPECVIVDTLLTKQTLEGIDGVVSVIEDHPVQPEEARPTNNNWFLDRIHNQQSRSNTTYIPTRSGKGVCIYIVDDGMRESHRDFSGRVAQTIRNVDGVSRAHGTLVASCAAGSLFGAAFEAEIYMAETLWTYADTIKAMDACIDHYIQNGRKPSVLNLSFTSMSSAGYRVVIDRAFSEGMTVVAAAGNHNDDSLKRFPANLDNVISVGCLTKDMVRASYSNYGELVDIWAPGHDGRAASAVDNNSARMATGTSSAAPVIAGVCAMILEGNPNLTNVEVRKELMTNGSLPFALGRVGYAQVTNTAPLPEPEPCPEPEPIDTSAIEQALADFNAAMQTFISSLNK

SEQ ID NO: 779 - DNA, 1242 bp, Unknown
  Obtained from environmental sample
atggggaagttatttttaaaaatatgttttttcgcattagtgaccgtatgttcattcgcagcgaaaatatcatacgctgaagagaggcaacaaaataattatccaatcatattggtgaatggatttgctggatggggtagagaagaaatgcttggcgtaaaatattggggtggtgttcatgatatacaggaagatttgaaacgcaatggttatacggtacataccgcagctgttggacctgtttctagtaactgggatcgtgcatgtgaattgtatgcacaaattagcggtgggacagtagactatggtgccgtacatgctgagaaacatggacataatcgttttggcagaacttatagtggttttgcgccgaattggagtgaaacaaataaagttcatttagttggacatagcatgggtggacaaacgattagaacattagtacagctattaaaagaaggtagttttgaagaaaagaattatgtgaaaaatcacccagacatcaaaatatcaccactatttgaaggcggaaaatcatatgttcatagtgttacaacattagcaacccctcacaacggtacaacacttgcggatggtagtcttctactgccgttcgttaaagatttactcattacagctgcaagctttggaggaaacaataatttatcattatatgattttaaattggatcaatggggtataaagaaaaatgctggagagtcctttttccaatatagtaatcgtattctaaatagttcactttggaaaaatacaaaagatataagtcaatgggatttaagtacagatggtgcaaaggagttaaataattgggtaaagacgcaaccagatgtgtattatttatcctatagtggacatgcatcacaagcagcacctataacaggtttacatttaccgcatattacgatgaataaattgttgatggggaatgcatttttcttaggttcttatgcgagatatgaagaaaaccgtccgttagttgatacttcttggtggcaaaatgatggtgtagtaaatacgaattctatgattgcaccatcttctaatgttgctgtaaataataatgggtcattacagattggaaaatggaatcatatcgaaacgaaagcgaattgggatcatctcgatatggtaggattaagtgtttcagactcattaggtttttctagcattcaagagttttatagaacaattgctgaaaagctatcacgtttaccgaaatag

SEQ ID NO: 780 - protein, 413 aa, Unknown
  Obtained from environmental sample
  SIGNAL (1)...(26)
MGKLFLKICFFALVTVCSFAAKISYAEERQQNNYPIILVNGFAGWGREEMLGVKYWGGVHDIQEDLKRNGYTVHTAAVGPVSSNWDRACELYAQISGGTVDYGAVHAEKHGHNRFGRTYSGFAPNWSETNKVHLVGHSMGGQTIRTLVQLLKEGSFEEKNYVKNHPDIKISPLFEGGKSYVHSVTTLATPHNGTTLADGSLLLPFVKDLLITAASFGGNNNLSLYDFKLDQWGIKKNAGESFFQYSNRILNSSLWKNTKDISQWDLSTDGAKELNNWVKTQPDVYYLSYSGHASQAAPITGLHLPHITMNKLLMGNAFFLGSYARYEENRPLVDTSWWQNDGVVNTNSMIAPSSNVAVNNNGSLQIGKWNHIETKANWDHLDMVGLSVSDSLGFSSIQEFYRTIAEKLSRLPK

SEQ ID NO: 781 - DNA, 1290 bp, Unknown
  Obtained from environmental sample
atgaagaccttccgcctccggctgctcgtgctgttccttctggccgcgacggccggctccgcctgcttgcggggcccggccaccgaggcgcgcggcgccggattctccgccgaccgcctcgcgcgcatcgatcgggtgctgcaggagtgcgtctccgacgaggcctgcctcccgggcgtcgtcgtcctcgctgcccggcacggccggacggagtacttcagaagcttcggggtcagcgatcgggagcaggggacgccgatgcgcaccgacacgctcttccggctcgcctccatgacgaaggcggtcaccagcgtcgccgtgatgatgctgtacgaggagggtcggttcatgctgaacgacccggcgcaccggttcatccccgagctgcgcaacgcggcggtggtggaccgcgtgaagcccgacgggtcctacaccaccgtgccggcccggcgggcggtcaccatccgcgatctgctcgcgcacacctcgggcatctcgtacgggttcctcgacgagaagatgaggccgatctaccgaaaggcggcggtcgtcgacgcgttcacgaacgagccgatcacgatcggcgagtcgatgcggaagctggcggcgctgccgctggcgagccagccgggcgagcgcttcctctacggcctgaacaccgacatgctcggccatctcgtcgaggtggtctcgggcctgccgctcgatcgcttcttccaggagcgcatcttcgcgccgctgcggatgaccgacacccacttctatctgccgccggagaaggccccccgcctggcggcgctctatgccgagcaggacggccggctggtgcccgccgacgaggtgccgacgagcgccctggcggcgcaggtgacgtcgaactatccgctcgagggcgcccggacgtacttctccggcggggcggggctgacgggcaccacggccgacttcgcgcggttcctgcagatgctgctcaacggcgggacactcgacggggtgcggctgctcagccggaagtcggtcgagctgatgacgaccaaccacatcggcgacctgtcgttcacgccgggacaccggttcggcctcggcttctcgatcgccgccgatccgggcgccatcggcgagctgacgtcgaccaacgcgtacggctggggcggggcgttcttcacgcagtactgggtcgacccgcaggagcagctcgtcatcctgttcatgtcgcaggtgctcccgacgacgagacgggacgtgtggaaccggacgcgcacgctcgtgtaccaggcgctggatcactag

SEQ ID NO: 782 - protein, 429 aa, Unknown
  Obtained from environmental sample
  DOMAIN (43)...(425): Beta-lactamase
MKTFRLRLLVLFLLAATAGSACLRGPATEARGAGFSADRLARIDRVLQECVSDEACLPGVVVLAARHGRTEYFRSFGVSDREQGTPMRTDTLFRLASMTKAVTSVAVMMLYEEGRFMLNDPAHRFIPELRNAAVVDRVKPDGSYTTVPARRAVTIRDLLAHTSGISYGFLDEKMRPIYRKAAVVDAFTNEPITIGESMRKLAALPLASQPGERFLYGLNTDMLGHLVEVVSGLPLDRFFQERIFAPLRMTDTHFYLPPEKAPRLAALYAEQDGRLVPADEVPTSALAAQVTSNYPLEGARTYFSGGAGLTGTTADFARFLQMLLNGGTLDGVRLLSRKSVELMTTNHIGDLSFTPGHRFGLGFSIAADPGAIGELTSTNAYGWGGAFFTQYWVDPQEQLVILFMSQVLPTTRRDVWNRTRTLVYQALDH

SEQ ID NO: 783 - DNA, 1431 bp, Unknown
  Obtained from environmental sample
atgggtatctttgactataaaaacctcggcaccgagggttccaaagcgctgtttgccgacgccatggcgatcacgttgtactcctaccacaacctggataacggctttgccgtgggttaccagcacaatggcttggggcttggtttgccggccacgctggtgggtgcactgctcggcagcacgaattcacagggtgtcattccgggcattccctggaacccggattcggaaaaagccgcgctggaggcggtgcaaaaagccggttggacgccgatcagtgcaagtaccctcggctacggcggcaaagtcgatgcgcgcggcacgttttttggcgaaaaagccggctacaccacggcgcaggtcgaggtgctgggcaagtacgatgacgccggcaaactgctggaaatcggcatcggctttcgcggcacgtcggggccgcgggaaaccttgatcagcgactccatcggcgacctggtcagcgatctgcttgcggcgctggggcccaaggattacgcaaagaactacgccggcgaagcgttcggcgggctgctcaaaaacgtcgccgattacgccgctgcccatggccttaccggcaaggacgtggtggtcagcggccacagcctgggcggcctggcggtcaacagcatggcggatttaagcaccaacaaatggtcgggcttctacacggacgccaactacgtggcctatgcatcgccgacccaaagcgccggcgacaaggtgctcaacatcggctatgaaaacgacccggtgtttcgcgcgctggacggctcatccttcaatctgtcgtccctgggcgtgcacgacaagccccacgagtcgaccaccgataacatcgtcagcttcaacgaccactacgcctcgacgctgtggaatgtgctgccgttctccatcgtcaacctgccgacctgggtctcgcacctgccgaccgcatacggcgacggcatgacgcgcatcctcgactccgggttctatgaccagatgacccgtgactccacggtaatcgtcgccaacctgtccgacccggcgcgggcgactacgtgggtgcaggacctcaaccgcaatgccgaaccgcacaagggcaataccttcattattggcagcgacggcaacgacctgatccagggtggcaagggcgcggactttatcgaaggcggcaaaggcaatgacacgatccgcgacaacagtgggcataacaccttcctgttcagtggccagttcggcaacgatcgcgtgattggctaccagaccaccgacaagctggtgttccaggacgtgcaggggagcaccgacctgcgtgaccatgccaaagtggtcggcgcggacacggtgctcacgtttggcgccgactcggtgaccctggttggcgtcggccatggcggcctgtgggcggacggcgtcagcatcggctga

SEQ ID NO: 784 - protein, 476 aa, Unknown
  Obtained from environmental sample
  DOMAIN (133)...(265): Lipase (class 3)
MGIFDYKNLGTEGSKALFADAMAITLYSYHNLDNGFAVGYQHNGLGLGLPATLVGALLGSTNSQGVIPGIPWNPDSEKAALEAVQKAGWTPISASTLGYGGKVDARGTFFGEKAGYTTAQVEVLGKYDDAGKLLEIGIGFRGTSGPRETLISDSIGDLVSDLLAALGPKDYAKNYAGEAFGGLLKNVADYAAAHGLTGKDVVVSGHSLGGLAVNSMADLSTNKWSGFYTDANYVAYASPTQSAGDKVLNIGYENDPVFRALDGSSFNLSSLGVHDKPHESTTDNIVSFNDHYASTLWNVLPFSIVNLPTWVSHLPTAYGDGMTRILDSGFYDQMTRDSTVIVANLSDPARATTWVQDLNRNAEPHKGNTFIIGSDGNDLIQGGKGADFIEGGKGNDTIRDNSGHNTFLFSGQFGNDRVIGYQTTDKLVFQDVQGSTDLRDHAKVVGADTVLTFGADSVTLVGVGHGGLWADGVSIG

SEQ ID NO: 785 - DNA, 936 bp, Unknown
  Obtained from environmental sample
atgccactcgatcctcaaattcaagcctatctcgatcagatggcggcaatgaatatgcccccgatacatacgatgacgcccgaacaggtacgaatgggaatagcgatgcagcttgcgatggagaacattgagaaagagcaggtggctcgcgttgagaaccgcaccattcccggcccggcgggcgagatacctgtgcgcatctacacgccgcagggcaacgggcctttcccggctctggtcttctttcacggcggcggctgggtgatctgtaacctggacacgcacgatggtatctgccgcagcctggcaaacggcgcgggctgcgtggtcgtctcggtcgattaccggctcgcgcccgaacacaaatttcctgccgcgcccgaagattgctatgccgcgacgcaatgggtggcgaagaacgcggcagagttgaacgtggaggcatccaacattgccatcggcggggatagcgcgggcggcaatctcactgccgtcgtggcgcagatggcgcgagatcggggaggcccgcatctcgtcttccagttgctaatctatcccgccaccgatttcaggatgaacacgccctccatcgaagagaacgccaccggctacttcctgacgaaagacgacatgatctggttcacgaaccattacctgaacagcgaagaggataagacgaacccgctggcctcccccctgctggcgagcgatctgagcggcctgcccccggcccttatcatcaccgcccagtacgaccccctgcgcgacgagggtgagttgtacgggcagaaattacgggaagcaggcgtccccgtcaccgtcagccgctacgaaggggttattcatggctttttcggcagcattccctccgataagggcaagcaggccgaggccgaagccagcgccgccctgcgtctggcctttggcaaagcgtag

SEQ ID NO: 786 - protein, 311 aa, Unknown
  Obtained from environmental sample
MPLDPQIQAYLDQMAAMNMPPIHTMTPEQVRMGIAMQLAMENIEKEQVARVENRTIPGPAGEIPVRIYTPQGNGPFPALVFFHGGGWVICNLDTHDGICRSLANGAGCVVVSVDYRLAPEHKFPAAPEDCYAATQWVAKNAAELNVEASNIAIGGDSAGGNLTAVVAQMARDRGGPHLVFQLLIYPATDFRMNTPSIEENATGYFLTKDDMIWFTNHYLNSEEDKTNPLASPLLASDLSGLPPALIITAQYDPLRDEGELYGQKLREAGVPVTVSRYEGVIHGFFGSIPSDKGKQAEAEASAALRLAFGKA

SEQ ID NO: 787 - DNA, 642 bp, Unknown
  Obtained from environmental sample
atgatgacctattcaacacaaaagatgtctatgctggcgttgctggcatccctactgtttgctggctccgccaatgccgcctgtaacgcagatcctatcgtattcattcacggctattcaggctggaaatcccagtttgatgtgatgatcaaccgcttcaagaatgacggcactccggcctgtgcgatgtacaagttcggatacaacagtcttctgaagagcaacaagaccagcgccaaagagctgagatcattcattaatggtattcggcccaatcatggcaaccgtcaagcgaaaattattgcgcactccaacggtggcctggtctcgcgctggtatcgtgtcttcgagggtggttcttccgcaactagccgtctggtcacgctgggcactccccacaaaggtactgcctgggcctatggctgcttcagccctgcctgctccgagatgcgttacaactcggacttcctgaagtcgctgaacgggcgtggttgcgatgtgtcgctatggtcggcattggatgaaatcatcatcccgcaaagcaatgcccagtgcggcaatagccgccagacctccagtgtgggtcacttgaccctgatggtctgggaaggcgtctacaaagacgttagacgctatctgtaa

SEQ ID NO: 788 - protein, 213 aa, Unknown
  Obtained from environmental sample
  SIGNAL (1)...(26)
  DOMAIN (30)...(211): Lipase (class 2)
MMTYSTQKMSMLALLASLLFAGSANAACNADPIVFIHGYSGWKSQFDVMINRFKNDGTPACAMYKFGYNSLLKSNKTSAKELRSFINGIRPNHGNRQAKIIAHSNGGLVSRWYRVFEGGSSATSRLVTLGTPHKGTAWAYGCFSPACSEMRYNSDFLKSLNGRGCDVSLWSALDEIIIPQSNAQCGNSRQTSSVGHLTLMVWEGVYKDVRRYL

SEQ ID NO: 789 - DNA, 1134 bp, Unknown
  Obtained from environmental sample
atgaatactcaatgtccgattgtattggtgcacggcatcctgggctatggctccagggagctcttgggattctcttactgggggcaggcgctgcaggcgccgagcccggtgccggtgcttgaggcatcggtcggtcctctttcgtcccatcatgatcgggcgtgcgagctttacgcgcaaatcaagggcttgccggtggattacggcgaggaacatgccgcaggcgccgggcatgcccgtttcggcaaggactacaccggtcgagggctttatccgcaatggtccgcggaaaatccgattcatctggtcggccattcgatgggcgggcccaccatccgcatgcttcagcatttgctggacataaaattttggcagaaagacaacagcgcctcctggatcaaatcggtgaccggcatttccggcgtgttcaacggttccaccttgacgcatatgttttgcgacgctgaaacaggaaaggtcaccaagcctctcggtgcggtgttgggcaaggtcgccaattttgccgccggcattgtgggttcaaaactggaccggctatacgatttcgatctggaacactggggattgacaagaaagtccggcgaaagcctggtcgattatctggctcgaatcgaccagtccaggctcttcagggagatcgataatgccgtctacgaccttacgattcacgccgcgctggaactgaacgcattgattccgacttttcccgagacctattatttttccttcgtcaccgaaaataccagcgctttgccgctgttgcgccttcatgggccgggcacggatatcagcgggctttttcttgccagctccgcctacatgggcatgtatccgttttttccgaaattttacgagggcttcaacagcgccgactggcgcgaaaacgacggcgccgtgccgtcttattcgcaaatgtatcccagactctccggcaggcatctggtcggcggagacctggacaccggcgaaggggaatttcagccggggcaatggtactggaaatacctgcacgaccgcgatcatctgaatgtggtgatgcttccgaaaccgttccaggcggattggcaaaaagcgttttatgccgatttgtttaatatgctggctgggttgtga

SEQ ID NO: 790 - protein, 377 aa, Unknown
  Obtained from environmental sample
MNTQCPIVLVHGILGYGSRELLGFSYWGQALQAPSPVPVLEASVGPLSSHHDRACELYAQIKGLPVDYGEEHAAGAGHARFGKDYTGRGLYPQWSAENPIHLVGHSMGGPTIRMLQHLLDIKFWQKDNSASWIKSVTGISGVFNGSTLTHMFCDAETGKVTKPLGAVLGKVANFAAGIVGSKLDRLYDFDLEHWGLTRKSGESLVDYLARIDQSRLFREIDNAVYDLTIHAALELNALIPTFPETYYFSFVTENTSALPLLRLHGPGTDISGLFLASSAYMGMYPFFPKFYEGFNSADWRENDGAVPSYSQMYPRLSGRHLVGGDLDTGEGEFQPGQWYWKYLHDRDHLNVVMLPKPFQADWQKAFYADLFNMLAGL

SEQ ID NO: 791 - DNA, 801 bp, Unknown
  Obtained from environmental sample
atgccaactgtgaaggtcaatgatatcgcactatattacgaagaccgcggtgagggagagccgctgatactgatccacggcctcggctccagcgcactggattggaagccacaactggacgacctgtcccgcgactaccgcgtgattgctctggatttgcggggacacggtcgttccgagcgcctgaaaaatggctacagcttaccgctgttcgccagtgacgttgccggcgtgctgcagacgctgaatatcgaatcagcgcacattgtcggcctgtcactgggtggctgcgtcgcatttcaattggcggttgatcggccagagttggtgcgcagtctgagtatcattaatagcggcccatcgcttgtgctggatacccccttgcgaaagcttgtcgtgtggtggcggtttgcactcataaacctgttcggtttgccagtgttaggcaaggtggtggcgcgccgtctgtttcccgatgctacgcaggaggaactgcggaggaccttcgtagaacgcttcgccgacaatgacccgcatatatataagcagagcctgaaagccctggtcggctggagtgttcgtgatcgacttggtgatatccgggtgccagtgctggtgttggcggccgaccaggactatacaccggtatcgatgaaggaggaatttgtccccctgatcccgcaggcgcacttgaaagtcattcccgatgcccaccacgccgcccccatggaatgcccggataaggtcaatcgcatgctgcgcgaatttctggaaggcctccccgcgatgggcacaaaatga

SEQ ID NO: 792 - protein, 266 aa, Unknown
  Obtained from environmental sample
  DOMAIN (46)...(255): alpha/beta hydrolase fold
MPTVKVNDIALYYEDRGEGEPLILIHGLGSSALDWKPQLDDLSRDYRVIALDLRGHGRSERLKNGYSLPLFASDVAGVLQTLNIESAHIVGLSLGGCVAFQLAVDRPELVRSLSIINSGPSLVLDTPLRKLVVWWRFALINLFGLPVLGKVVARRLFPDATQEELRRTFVERFADNDPHIYKQSLKALVGWSVRDRLGDIRVPVLVLAADQDYTPVSMKEEFVPLIPQAHLKVIPDAHHAAPMECPDKVNRMLREFLEGLPAMGTK

SEQ ID NO: 793 - DNA, 780 bp, Unknown
  Obtained from environmental sample
atgtcccgttttcaactttgggctctgaccgtgctggtcacgatcgggctggctcgttccgtaaacggtcaagaggatttgacgtttgacgttggaggcgagaagttcgtcgtcaaaagatacccggaaaatcctgacgccatgaaacggcccgtggttattctcgtgcatggaatcgatggcatgggcggcgcctccggggttcagatcaagagctttgccgaggaactcgctaaaggaggatacctggccctggttccccagtacttcggtaagaacgacggctccgactcggacgagttcaacaagcttatcgagttgcgtctcgggaaattcgatgattatgtcccgcgtatcgccgccgtagtgcaaaccgccatggaccaaagcgatgccgatggggatcgccttggactggttggcttctcccttgggggagggctggtactcaagcaagcgcagtcagcccccgctgacaagatcaaggcagtcgtgaacttctacggttacatcccgaattctggtattttcatgaatgccgacaagcttcctccgacgctgatcctacataacaagaacgatagggttgtgaagatcggcgtctccgaggctctactccgcgccttgaagaaaacgagtgtgaagcacgatcatcgcttctacgatgaggagtattttttccgactccaccacacgtttcgtcctgggggcaacgccgatgtcgattcccgaaaacggactctcgactggctaaattcgcatctcaaggcgtcgaactga

SEQ ID NO: 794 - protein, 259 aa, Unknown
  Obtained from environmental sample
  SIGNAL (1)...(23)
  DOMAIN (38)...(255): Dienelactone hydrolase family
MSRFQLWALTVLVTIGLARSVNGQEDLTFDVGGEKFVVKRYPENPDAMKRPVVILVHGIDGMGGASGVQIKSFAEELAKGGYLALVPQYFGKNDGSDSDEFNKLIELRLGKFDDYVPRIAAVVQTAMDQSDADGDRLGLVGFSLGGGLVLKQAQSAPADKIKAVVNFYGYIPNSGIFMNADKLPPTLILHNKNDRVVKIGVSEALLRALKKTSVKHDHRFYDEEYFFRLHHTFRPGGNADVDSRKRTLDWLNSHLKASN

SEQ ID NO: 795 - DNA, 948 bp, Unknown
  Obtained from environmental sample
atgtctgagcccttcatccgccccgacgttcgcatcttcctcgattatctcaacagcctgccggggccgcgctctcatcaggttgggccggcggaggcgcggtcgatgatgcacgcctcccgccatgtcgccgacgggccggcgggcgaactggcggtgatccgcgacctgaactgccccgggcctgggggcgacatcccgcttcggctgtacgacgcgcgggagagccgcgaggcggggccgctgctggttttcttccacggcggcggcttcgtgcttggcgacctcaacacgcacgagcccttttgcgccgagatcgcgcggctgctcgacctgccggtggtggcggtggattaccggctcgctccggagcatccctggccggcgggggccgaggattgcatcgccgcggcgcgctggctggcgacaagtccggccgctctcagtcgcgaggtaaccggcctcattatctgcggcgacagcgccggcggcaatttcgcgatcgtgacgacactctccttgagagacgagccggcggcggtgccggtgatcgcgcaatggccgatctatccggccgccgatccggccaagggctacccctccttcgaggacttcgccgaaggctacctgctgacccgcgaaggcatgaagtggttcgacgaatgctacgccgccgatgcgaaagactggcgctattcgccgttggtcaagagccaggaggggatgccgcccactttggtggtaacggccagcctagacccgatccgggaccagggccgcgcctatgccgccgcctgcgtccaggccggggtgccgacggtgttccgcgaggcgagagggacgatccacggcttcatcaaccttcgcaaggcgatcccctccgcccaggccgatatcgagggatgcgtcgcggccctgaagctgatgatcgacgaggcgcggagatga

SEQ ID NO: 796 - protein, 315 aa, Unknown
  Obtained from environmental sample
MSEPFIRPDVRIFLDYLNSLPGPRSHQVGPAEARSMMHASRHVADGPAGELAVIRDLNCPGPGGDIPLRLYDARESREAGPLLVFFHGGGFVLGDLNTHEPFCAEIARLLDLPVVAVDYRLAPEHPWPAGAEDCIAAARWLATSPAALSREVTGLIICGDSAGGNFAIVTTLSLRDEPAAVPVIAQWPIYPAADPAKGYPSFEDFAEGYLLTREGMKWFDECYAADAKDWRYSPLVKSQEGMPPTLVVTASLDPIRDQGRAYAAACVQAGVPTVFREARGTIHGFINLRKAIPSAQADIEGCVAALKLMIDEARR

SEQ ID NO: 797 - DNA, 900 bp, Unknown
  Obtained from environmental sample
atgaaggcaagctgccgcgacatcgaaatcgaatacgaaacattcggccatccggacgacccggccatcgtgctgatcatgggactcggtggccagctcatcctgtggccggaagcgttctgccgcatgctggccgacgctggtcactacgtggtgcgcttcgacaaccgcgacatcggcctgtcgacgcatctcgatcaccttccccgccccaacctgccgctcgccgcgctccgccaggcgctgcgcctgccagttcgcgccagttacacgctcgacgacatggcggacgacgtcgcgggcctgcttgatgcactgaacatcaagcaggcgcacgtcgtcggcgtgtcgatgggcggcatgatcgcccagctgctggccgcacggcacgcgacccgcgtgcgcagcctgaccttgctgatgaccaccagcggcgcgcgcaacgttccgggcccctcactcggcatgcgcatggaaatgatccgtcgaccgcgcgacacctcgcgcgaggggctgatccgccatggtatgcgtacctggcggatcatcggcagcccgacgtacccgaagccggaagccgaactgcgccgcatcgtcgccgagggctttgaccgcgcgtttcacccggccggtttcatgcgccagctgcacgccgttctcgcggcaccgagccgcgcacccctgctgccgcgcatcaaacagccggccgacgtcattcacggcgacgccgacctgctggtaccagtggcagcggcacgtgatctggtgcgccgcctgccgaacgccacgctcgacatcgtgccgggcatggggcatgacttcccgaccgagatcatgccgcgtatcgcgcgccgcattgtcgaaaccgcggcacgcgacccgcagcggctcgccgcctag

SEQ ID NO: 798 - protein, 299 aa, Unknown
  Obtained from environmental sample
  DOMAIN (49)...(288): alpha/beta hydrolase fold
MKASCRDIEIEYETFGHPDDPAIVLIMGLGGQLILWPEAFCRMLADAGHYVVRFDNRDIGLSTHLDHLPRPNLPLAALRQALRLPVRASYTLDDMADDVAGLLDALNIKQAHVVGVSMGGMIAQLLAARHATRVRSLTLLMTTSGARNVPGPSLGMRMEMIRRPRDTSREGLIRHGMRTWRIIGSPTYPKPEAELRRIVAEGFDRAFHPAGFMRQLHAVLAAPSRAPLLPRIKQPADVIHGDADLLVPVAAARDLVRRLPNATLDIVPGMGHDFPTEIMPRIARRIVETAARDPQRLAA

SEQ ID NO: 799 - DNA, 1245 bp, Unknown
  Obtained from environmental sample
atggattcggctgaactgcgccgggcgatggagggtcaggtgcagaaagtggggctgcgcttcgaggccgacctgagcaatacgatattggacgatgtccagggtgaaccgggggccatgccgctgctgcagcacgcactgctggagctgtggaagaggcgccacggccggtggctcctgagcagcgagtatcgggaaaagattggcggtgtcaagcaggccatcgcccgcacggcggatgagatttatgaacattcttcaaaagaagaccaggaacggatgcgcaacatcttcatccggctcaccaggcttggtgatgagaccgcttcggagcaggagcaacgcgacacccgtcgccgacgcgcgatgtgggagttggagtcagaaggagacagcctggaaactgtcaggaaacttgtgcatcgtcttggttcagaaaatgcacgcctggttgtaataaaagagaaagagctgggtgccaggctggaagaggccgaagtcgaagtagcccatgaggccttgatccgtcactggccaagattgcgacaatggctgaatgaagaccgggtcagctaccggctacgcgacaccatcagcgaggataccaaggagtgggagaaatccggcaatgacgataacctgctgccgcgctggaatagcaaactggaggcggcgctggaactttcccgaggaagaccgggctttttcaccaaactggagaaggagtacctggattcctgtggtaagctgcgggacaaggaaacattggagcgtgagcaacgagagacggaactcagaaccgctttggcagaagcccaacaccaaggccgaatcgctacggcgcgccatctggcgacccaatcacaagctacactatcaagttaccctcagcgaagcctgcttctcgccatcgaggctgttgcaacttccacgcgggcaggtgaaattcgagttccagtagctgaagaaggactgcggcaggcacttgctaatattggggggctatgcctgagtggccaccatggtccagtcaacgccgttgccatcagcgccgacaatcgccggctggtgaccggaagttttgataacacggcgcggctgtgggacttgtccctggatgagcaggttaaactggcctgccgcacggccggccgaaatttgagcattgaggagtggcaacaatacatgggggaccaaccctaccgggaaacctgttccgaaaaccttgaaggttctcgcaagtag

SEQ ID NO: 800 - protein, 414 aa, Unknown
  Obtained from environmental sample
  DOMAIN (332)...(369): WD domain, G-beta repeat
MDSAELRRAMEGQVQKVGLRFEADLSNTILDDVQGEPGAMPLLQHALLELWKRRHGRWLLSSEYREKIGGVKQAIARTADEIYEHSSKEDQERMRNIFIRLTRLGDETASEQEQRDTRRRRAMWELESEGDSLETVRKLVHRLGSENARLVVIKEKELGARLEEAEVEVAHEALIRHWPRLRQWLNEDRVSYRLRDTISEDTKEWEKSGNDDNLLPRWNSKLEAALELSRGRPGFFTKLEKEYLDSCGKLRDKETLEREQRETELRTALAEAQHQGRIATARHLATQSQATLSSYPQRSLLLAIEAVATSTRAGEIRVPVAEEGLRQALANIGGLCLSGHHGPVNAVAISADNRRLVTGSFDNTARLWDLSLDEQVKLACRTAGRNLSIEEWQQYMGDQPYRETCSENLEGSRK

SEQ ID NO: 801 - DNA, 960 bp, Unknown
  Obtained from environmental sample
atgagaaagatgttggcggtcggatttggtctcattgctgtatttgttttattgatcgcagggatttatttcctgttcccggaaacattgttcaacctggcgctgcaagctcaaagacactcttccggcctggccaggaaggaaatccaggtggatgatcataaaatcgtgtatctggaaggaggaaaagggcaatcgatattattgcttcatggctttggagcaagcaaggacgactgggcacaattcgcaaagtacctgacaggcgactatcacgtggtgatccctgatattccaggttttggcgaaagctctcagatacagaaagcaagttatgatacggaaaaccaaatgaagcgcatcgaccggtttacggagataatgaaactcgaaagatttcatctggcaggaaattccatgggagggatgcttgctgcagcgtatggggcaaactatccccagaaggttgctacgctggcgctgttggcgccgggtggcgtcaaatctccaaaaataagcgagatggccatgctgatacagaaggggacaaatcctttactggcaggcagtcccgaagattttgataaactgctaaaattattgtttgccaaacctccgttcatcccttcccagtttaaaaaagttttcgccgccgatgctattgcgcacagtgattttaataaaaaaatattggacgatatgaaatgggatcacacaggagcgacgccgtctccaatggaaacttttctggatccttatttgcctcagattcaggcgccggttttgattatctggggcgataccgacaagattctggacgtgggaggcgttgcggttttagaaaagaatttgaaaaattacaaaaccgtcatcatgaaagatacaggacatatccccatgttggaaaatccgcaggagacagcagcacactatgtaagctatctgaaggggaaaaagtaa

SEQ ID NO: 802 - protein, 319 aa, Unknown
  Obtained from environmental sample
  DOMAIN (91)...(313): alpha/beta hydrolase fold
MRKMLAVGFGLIAVFVLLIAGIYFLFPETLFNLALQAQRHSSGLARKEIQVDDHKIVYLEGGKGQSILLLHGFGASKDDWAQFAKYLTGDYHVVIPDIPGFGESSQIQKASYDTENQMKRIDRFTEIMKLERFHLAGNSMGGMLAAAYGANYPQKVATLALLAPGGVKSPKISEMAMLIQKGTNPLLAGSPEDFDKLLKLLFAKPPFIPSQFKKVFAADAIAHSDFNKKILDDMKWDHTGATPSPMETFLDPYLPQIQAPVLIIWGDTDKILDVGGVAVLEKNLKNYKTVIMKDTGHIPMLENPQETAAHYVSYLKGKK

SEQ ID NO: 803 - DNA, 1146 bp, Unknown
  Obtained from environmental sample
gtgcagatccagggtcactatgagctgaagttcgaggcagtgcgtgaagcgttcgccgcgttgttcgatgatccccaggagcgtggcgctgcgctgtgcatccaggtgggcggggaaaccgtggtcgacctctgggcgggcagcgccgacaaggacggccagcaggcctggcacagcgataccatcgccaacttgttctcctgcaccaaaaccttcacggccgtcaccgcgctgcaactggtgggcgaaggcaagctggctttggacgccccggtagcgcgctactggccggagttcgcccaggcaggcaaggaatctgtcaccctgcgccagttgctcagtcaccgtgccggtctgccggccatccgcgaactgctgcccgccgaggccctgtacgactggcaaaccatggtcgataccctggccgccgaggcgccttggtggacaccaggtaccgagcatggctatgccgccatcacctacggttggctgattggcgagctcattcgtcgggtcgacggccgtgggccgggcgagtcgatcgtagcccgcaccgcccggccattggggctggactttcacgtcggcttggccgatgaagaatttcatcgtgtagcgcacatcgcccgtggcaaaggcaacgccggtgatgccgccgcccagcgcctgctgcaggtcaccatgcgcgaacccgaggcgctgagcacccgcgcattcaccaacccgcctgcgatcctgaccagcaccaacaagcctgagtggcggcgtatgcagcagcctgcagccaatggccacggcaatgcccgcagcctggcgggtttctacgccggcctgctggacggcagcctgctggagtccgagctgcttgacgagctgacccgcgagcacagcctcggccaggaccgtaccctgctgactcagacgcgattcggtctcggttgcatgcttgaccagcccgatgtggcaaatgccacgttcggcctcggctccagggcctttggtcacccaggggcaggtggttccgtcggatttgctgacccggaacacgacgtttccttcggttttgtggtcaataccctcggcccctacgtgctaatggaccctcgtgcccagaagctggtccgggtgttgggcagttgcctttga

SEQ ID NO: 804 - protein, 381 aa, Unknown
  Obtained from environmental sample
  DOMAIN (14)...(376): Beta-lactamase
MQIQGHYELKFEAVREAFAALFDDPQERGAALCIQVGGETVVDLWAGSADKDGQQAWHSDTIANLFSCTKTFTAVTALQLVGEGKLALDAPVARYWPEFAQAGKESVTLRQLLSHRAGLPAIRELLPAEALYDWQTMVDTLAAEAPWWTPGTEHGYAAITYGWLIGELIRRVDGRGPGESIVARTARPLGLDFHVGLADEEFHRVAHIARGKGNAGDAAAQRLLQVTMREPEALSTRAFTNPPAILTSTNKPEWRRMQQPAANGHGNARSLAGFYAGLLDGSLLESELLDELTREHSLGQDRTLLTQTRFGLGCMLDQPDVANATFGLGSRAFGHPGAGGSVGFADPEHDVSFGFVVNTLGPYVLMDPRAQKLVRVLGSCL

SEQ ID NO: 805 - DNA, 777 bp, Unknown
  Obtained from environmental sample
atgaaaataggtattgctctttcaggaggtgggacaagaggaattgctcatttaggggtaattaaggcgttaatggaaaataatatccagatcagctctatttccggagttagtgcaggggcaattgtggggggatttatttcatatggttatcaccctgaagaagtacttgaaatcattcttaaaacacgattatttaaatatctgaggcccgggataagtagtacaggattacttaagcttgaacagctgcaggttctattaaaacagtatataaaagaagatttatttgaggatttaaaaattcctttaactgtatcggccttaaatcttaaaacaggaagaattaattattttgattcaggtcctcttattgcccccatcctagcttcctcctccatcccagttatttttaatccgattttgattaatggaatacagtttatcgatggaggattagcggaaaatttacctgttagtccattaaaagggtctgttgactttatacttgcttcccattgcaatccaattaatacagagattcaaaggcttactatcagaacctatatcgaaaggttgttactgattaccattaataacaatgctcaacactcgttgaaggaagtagatttcgtaattgagccacctgaactaaaaaatatcagatggtctgattcttcaaaggctaaattgatatttgagatggggtatcaacacacattggaggtaatcccagcattaaagaaaaaaacaagagagttaaatctcgatatttag

SEQ ID NO: 806 - protein, 258 aa, Unknown
  Obtained from environmental sample
  DOMAIN (5)...(163): Patatin-like phospholipase
MKIGIALSGGGTRGIAHLGVIKALMENNIQISSISGVSAGAIVGGFISYGYHPEEVLEIILKTRLFKYLRPGISSTGLLKLEQLQVLLKQYIKEDLFEDLKIPLTVSALNLKTGRINYFDSGPLIAPILASSSIPVIFNPILINGIQFIDGGLAENLPVSPLKGSVDFILASHCNPINTEIQRLTIRTYIERLLLITINNNAQHSLKEVDFVIEPPELKNIRWSDSSKAKLIFEMGYQHTLEVIPALKKKTRELNLDI

SEQ ID NO: 807 - DNA, 873 bp, Unknown
  Obtained from environmental sample
atgctcccccgcgccgccactcttttttccctcctcctcctcagcaacctcgcatacgcccaggaagtcatccgcctttacgacggccccgcgcccggaagcgagacctggacccacgaagaaaaggaattcttctcgaccgcctggaataccgacgtcgtcaccaatgtcgtcaacccgaccctgaccgcctacctgcccgaccccgcccaagccaccggcaccgccgtcatcatcgcgcccggcggcggcttttacgggctgtccatcaactccgagggtgccgaagtcgcccaatggctcagtgagcgcggaatcgcaggattcgtccttcgctacaggctggtcccgaccggagaagatggcacaaaggaattttcagacaacttcactgccgatcggcccaaggtgttgcagaaaatcatgcccgtactgcccctggccggcgccgacggcctcgccgccgtccgctacgtccgcgaaaacgcggaacggtttggcgtcgcgcccgaccgcatcggcttcatgggattctcagccggcggcggcgtgaccatgtacgtcgccaaccactacgaacccgcgagccggcccgacttcatcgcgcccatctacgccggcggcgcgcgcgtcaatgacgtgcctgccgatgcgcccccgatcttcgtcgtcgccgcctcggacgatgaactgggcctcgccgccgacagcgtcgccctctacagcaagtggctcgaggccggcaagcccgccgaactccacatatacatgcgcggcggccacggtttcggcatgcgccgccagaatctccccaccgacacctggatcgaccgcttcggcgactggctccagacgcagggcttcctcaactag

SEQ ID NO: 808 - protein, 290 aa, Unknown
  Obtained from environmental sample
  SIGNAL (1)...(20)
MLPRAATLFSLLLLSNLAYAQEVIRLYDGPAPGSETWTHEEKEFFSTAWNTDVVTNVVNPTLTAYLPDPAQATGTAVIIAPGGGFYGLSINSEGAEVAQWLSERGIAGFVLRYRLVPTGEDGTKEFSDNFTADRPKVLQKIMPVLPLAGADGLAAVRYVRENAERFGVAPDRIGFMGFSAGGGVTMYVANHYEPASRPDFIAPIYAGGARVNDVPADAPPIFVVAASDDELGLAADSVALYSKWLEAGKPAELHIYMRGGHGFGMRRQNLPTDTWIDRFGDWLQTQGFLN

SEQ ID NO: 809 - DNA, 1425 bp, Bacteria
atgggtatctttgactataaaaacctcggtaccgaggactccaaggcgctgttcgccgatgccatggcgatcacgctgtattcctaccacaacctggataacggctttgccgtcggctaccagaacaacggcctcggcctgggcttgcccgccacgctggtcagcgcgctgattggcggcagcaacgcccaaggggtcatccccggcatcccctggaatcccgactcggaaaaagctgccctcgacgcggtgcagaaagccggctggacgcctatcagcgccagtaccctgggctacagcggcaaggtcgatgcgcgcggcaccttctttggcgaaaaattcggctacggcacggcgcaggccgaggtgctgggcaagtacgatgacgctggcaagttgctggaactcggcatcagttttcgcggcacttcggggcctcgggaaagtgtgatcaccgattccatcggcgacgtgatcagcgacctgctcgccgccttcgggcccaaggattatgccaagaactacgcgggcgaggccttcggtggcttgctcaagaacgtggcggactatgccagtgcccagggcctgggcggcgatgacgtagtagtcagcggccacagcctgggcggcctggcggtcaacagcatggccgacttgagcgacagcacctggtcagggttttataaggactccaactacgtggcctatgcttcgccgacccaaagcgccggcgacaaggtgcttaacgtcggctatgaaaacgacccggtgttccgcgccctggatggctcgtcattcaacctgtcgtccctgggcgtgcacgacaaaccccacgaatcgagcaccgacaacatcgtcagcttcaacgaccactacgcctcatccctgtggaacgtgctgccgttttccatcctcaacctgcccacctgggtctcgcacttgcccaccggttacggcgacggcatgacccgcatcctcgactcgggcttctacgagcagatgacccgcgactccacggtgatcgtcgccaacctgtccgaccctgcacgggccaccacctgggtgcaagacctcaaccgcaatgccgaggcgcacaagggcaataccttcatcatcggcagtgacggcgacgacctgatcaaaggcggcaggggcgcggactttattgaaggcggcaagggcaatgacacgatccgcgacagcagcgggcataacacgtttttgttcagcgggcagtttggcaacgaccgggtgattggctatcaggcgacggacaagctggtgttcaacgacgtggcgggcagcaccgattaccgcgatcacgccaaagtggtgggcggggataccgtcattagctttggtacggattcggtgacgctggtgggtgtgagcagtctgtcgggggaggggatagtcatcagctaa

SEQ ID NO: 810 - protein, 474 aa, Bacteria
  DOMAIN (133)...(265): Lipase (class 3)
MGIFDYKNLGTEDSKALFADAMAITLYSYHNLDNGFAVGYQNNGLGLGLPATLVSALIGGSNAQGVIPGIPWNPDSEKAALDAVQKAGWTPISASTLGYSGKVDARGTFFGEKFGYGTAQAEVLGKYDDAGKLLELGISFRGTSGPRESVITDSIGDVISDLLAAFGPKDYAKNYAGEAFGGLLKNVADYASAQGLGGDDVVVSGHSLGGLAVNSMADLSDSTWSGFYKDSNYVAYASPTQSAGDKVLNVGYENDPVFRALDGSSFNLSSLGVHDKPHESSTDNIVSFNDHYASSLWNVLPFSILNLPTWVSHLPTGYGDGMTRILDSGFYEQMTRDSTVIVANLSDPARATTWVQDLNRNAEAHKGNTFIIGSDGDDLIKGGRGADFIEGGKGNDTIRDSSGHNTFLFSGQFGNDRVIGYQATDKLVFNDVAGSTDYRDHAKVVGGDTVISFGTDSVTLVGVSSLSGEGIVIS

SEQ ID NO: 811 - DNA, 750 bp, Unknown
  Obtained from environmental sample
atgtcaggcaagtacactgttttggaaggcgctgaaccgttttattttgaaggaagcagagttgggattcttgtgtcgcatgggtttaccggcagcacccaaagcatgaggccgcttggggaagcctatgcaaaggcaggttatacggtttgcggcccgcgtctgaaggggcatggcacccattacgaggagatggaacagactacatataacgattggattgattcagtcgaggaaggctaccagtggctgaaggaacgctgcgatacaatatttgtaactggtttgtccatgggcggaacccttaccctgtatatggctgaaaatcatcctgaaattaaggcaatcataccaattaatgcagctattcaaatttccgacatggccgctgcagccaaccttgatggagtgcgattccttgatgcgattggttccgacattaagaagcagggtgaaaaagagctcgcttacgagaaaactcctgtaaagtcccttggtgagatcgtagcgttaatggaaaaggttaaagctgacctttccgatatcacttgtccagcacttatttttgtttcaaaggaagatcacgttgtgccgccagataactcaaggattatcaaggaacaaatccgttctgccgataagagcctgattgagctgtcagaaagctatcatgttgccacactggacaatgaccaggagatcattatcaaggaaacattaaaattcattgaggaacagcttgggaaataa

SEQ ID NO: 812 - protein, 249 aa, Unknown
  Obtained from environmental sample
MSGKYTVLEGAEPFYFEGSRVGILVSHGFTGSTQSMRPLGEAYAKAGYTVCGPRLKGHGTHYEEMEQTTYNDWIDSVEEGYQWLKERCDTIFVTGLSMGGTLTLYMAENHPEIKAIIPINAAIQISDMAAAANLDGVRFLDAIGSDIKKQGEKELAYEKTPVKSLGEIVALMEKVKADLSDITCPALIFVSKEDHVVPPDNSRIIKEQIRSADKSLIELSESYHVATLDNDQEIIIKETLKFIEEQLGK

SEQ ID NO: 813 - DNA, 1116 bp, Unknown
  Obtained from environmental sample
atgataacaacaaacagattcctgatcctgctcctcggctccctgctgttttacggttgcagcgagagggtggatgccccgacgccaactccggagccagcggtgctggcagacttcagtggtctggatgagggttggaacaggattgagcccggtggtggcacggtatgctccgatgggtcgccctatcattttcatgtgcgggccggggatccggaaaaactcatgttctatctggaaggtggtggcgcctgctggatgggtctgaactgtgatccaacgctgcagcccagttaccagatcaatcttgccaacacagatccgtcccgtgctcatggcatttttgcctttgatctgccccggaatccgttcgctgactacacagtggtcatggcaccttactgttcaggcgatgtgcatctgggtgatgtcgagcagacctacccggtgcctgcggtgaacgggcgcgatgccggtgaggtgcatgtccgccatcgtggctgggcgaatgcacaggcggccatgaactgggctttcgaccacgtttttgcgccacagactgtatttgtcaccggctccagcgccggttcgattcctgcaccattctatgcggtaaagatggccgagcggtacgacagcgcccgtgttgtggcgctgggtgacgggtccggaggttatcgcggattcggtaatttcacgcctcatgaggcttgggccatcggcaatgtgatcagtgatcttgagtacacacgcaatatctcgccagaggctttcagcttccaccacctgtatattgcagctgcccggcagaacccttcaatcatgctgtcttccttcgacacggctgaagatgatgttcagaaacgtttcctggcgttgggtggtgcacctgccgaagcgctgcagccgttactggaaaccaatctggaggaaatcagcgagcaggcgccacagttccggtattttgtggctggtggcgacatgcataccattctgctgcgcccggagacctacagttattccaccaacggtgtgcgctttgttgactggctggccgggctcgccaatggcgagccggtggacaacgtcatgtgtggcgactgcagtcaaccctga

SEQ ID NO: 814 - protein, 371 aa, Unknown
  Obtained from environmental sample
MITTNRFLILLLGSLLFYGCSERVDAPTPTPEPAVLADFSGLDEGWNRIEPGGGTVCSDGSPYHFHVRAGDPEKLMFYLEGGGACWMGLNCDPTLQPSYQINLANTDPSRAHGIFAFDLPRNPFADYTVVMAPYCSGDVHLGDVEQTYPVPAVNGRDAGEVHVRHRGWANAQAAMNWAFDHVFAPQTVFVTGSSAGSIPAPFYAVKMAERYDSARVVALGDGSGGYRGFGNFTPHEAWAIGNVISDLEYTRNISPEAFSFHHLYIAAARQNPSIMLSSFDTAEDDVQKRFLALGGAPAEALQPLLETNLEEISEQAPQFRYFVAGGDMHTILLRPETYSYSTNGVRFVDWLAGLANGEPVDNVMCGDCSQP

SEQ ID NO: 815 - DNA, 849 bp, Unknown
  Obtained from environmental sample
gtgcaagacctccgtagaattatgaaggagtacagattcccggaaaccccagaagaggtcgaatcaactaaggattattacttggaacagaacggcgaaagaatcaggatgaggctgtacaccccaataggaggctccgactcccttatagtgtattaccatggcgggggctttgtattcggggacataaaactctatgacaatgtatgcaggaagatcgcgacaagatcatcctccaaggttctctctgtaaagtacaggctggccccggagcataaatttccggcagcagtagatgatgcctattctgcgtataaatgggcgaggaagaacgcacgcgagatcggcataaaggaaggcctcatagcagtgggaggggatagcgctggcggaaaccttgcggctgttgttacgttaaaggcgaaggatgagaaatacgatcagccaatgctccaggtccttttctatccagcccttggtccagacttcttcagcgaatccctgagggaatatggcgaagggtatttccttacaaagaagcagatggacaacttcggggcaatgtatttcaggaacccggctgatgccttcagtccctacttcgcgcctatcctttacggaaacttttccggcgttgcggaggccataattgtaacggcagagcacgatccccttagggatcagggggagatgtacataaaagagctctatgactccggcgtccaggtcacaggaataagggcaaagggcatgatacatggtttcctgagcttttcggccattgtcccggccgcggacaacctattcacaatggtatgggcgatggtaggttcaaaactcaggaaataa

SEQ ID NO: 816 - protein, 282 aa, Unknown
  Obtained from environmental sample
MQDLRRIMKEYRFPETPEEVESTKDYYLEQNGERIRMRLYTPIGGSDSLIVYYHGGGFVFGDIKLYDNVCRKIATRSSSKVLSVKYRLAPEHKFPAAVDDAYSAYKWARKNAREIGIKEGLIAVGGDSAGGNLAAVVTLKAKDEKYDQPMLQVLFYPALGPDFFSESLREYGEGYFLTKKQMDNFGAMYFRNPADAFSPYFAPILYGNFSGVAEAIIVTAEHDPLRDQGEMYIKELYDSGVQVTGIRAKGMIHGFLSFSAIVPAADNLFTMVWAMVGSKLRK

SEQ ID NO: 817 - DNA, 1632 bp, Unknown
  Obtained from environmental sample
atgaaccaaaatgcaccttatcatcccatcatttacgtgcgcggtttcgccgccacgcagggtgaaatcgaagaaacctgcgccgatccctacatgggattcaacctcggctcaaccaaggcccgccaagtctggactggcgaattgaagaagtttttcttcgagtcgccgctggtgcgccttcatacggaccacgactaccgggacgtctattttgagggcgaagacctcgtcgcctcggatcgctcagacatcccgctgccgtacaagtcagtcgtgatctatcgctattacgacgaggcctcggaagccttcagcaacggaaatactccgccgatccagcacttcggcatcggactcggaaagttgatcctgcagttgcgcgacaagatttgcagcaatgccgagaacggcgttgcacccgaagatttccgcgtctatctggtggcccattccatgggtggtctggtgtgccgctgctttctgcaaaacctgcagctcggcaccgatccaaagttcgccctgagtccggcggaactggcaaatttgagtgaagcacggaaactcgtggacaagtttttcacctacgcgactccgcataatggcattgacctgcgcatcgttcgtaacgttcccgcttgggccagcttcggtgacgtgaacaacttcaaccgcgatcgcatggctgattacctcggcctgcctgtcggcaacgatgacgtctcggatttgggccccttccccgctgaacgcgtcttcaacctcgtcggcaccaacccaaatgattacgcggtgatgcggggggtttccgcctgggcagccggggacgccagcgacggtctggtccgcatcgagaacgcaaccacccacggacgcgacgcgcaaggcaacgacatctcctccccgcgtgcctacgtcaaccgaagtcattccgggcattacggaatcgtcaactccgaggaaggttaccagaacatgacccgtttcttcttcggcaacttccgcatcgatggcgtgttggacattgatgagttgcttctgcccaaagaggtcaacgacaagctgacggaaatgtcagctgcagaccgggacaagttcaaggcgtcatatcagttcgaagtggcggtcagcattcgcaactgtcagtggcagatgcaccggcgcaacgtccgagaaaactccgccattttcagaacttacgaccagctctttccccgcgacgctcaagggatccgccaaccggatcgccaacaaagcccccatttgttctctgcatttctcgaccaagccagaagcatcaagcgcacaaaatccgtgagcctggcgtttgacgtctcggtgctcgtcccggattacaccattgacggagtgctgttcttcaaacgtcactacgaaggcggttacatttacaaggagcagatcatcgtcgaagcaacccctgatgaagaggcgttgggcggctggcgcattaattatggctaccagaacgacactcccaacctggcgcgcaaactggccgaaacccgcgcactgccaaacaagcaaggccttgccttcgatattgaaatcatcaaggacacccggcccggcatcaaagccagactccgggtcgaagccagagaatgggcttaa

SEQ ID NO: 818 - protein, 543 aa, Unknown
  Obtained from environmental sample
MNQNAPYHPIIYVRGFAATQGEIEETCADPYMGFNLGSTKARQVWTGELKKFFFESPLVRLHTDHDYRDVYFEGEDLVASDRSDIPLPYKSVVIYRYYDEASEAFSNGNTPPIQHFGIGLGKLILQLRDKICSNAENGVAPEDFRVYLVAHSMGGLVCRCFLQNLQLGTDPKFALSPAELANLSEARKLVDKFFTYATPHNGIDLRIVRNVPAWASFGDVNNFNRDRMADYLGLPVGNDDVSDLGPFPAERVFNLVGTNPNDYAVMRGVSAWAAGDASDGLVRIENATTHGRDAQGNDISSPRAYVNRSHSGHYGIVNSEEGYQNMTRFFFGNFRIDGVLDIDELLLPKEVNDKLTEMSAADRDKFKASYQFEVAVSIRNCQWQMHRRNVRENSAIFRTYDQLFPRDAQGIRQPDRQQSPHLFSAFLDQARSIKRTKSVSLAFDVSVLVPDYTIDGVLFFKRHYEGGYIYKEQIIVEATPDEEALGGWRINYGYQNDTPNLARKLAETRALPNKQGLAFDIEIIKDTRPGIKARLRVEAREWA

SEQ ID NO: 819 - DNA, 849 bp, Unknown
  Obtained from environmental sample
atgacggccgagatcctgaaaaccaaagtcagttttgagacggtcgagttcgaccgcttcaccgcctgctttgccgaatccaacaattgcgtggagccctgcgaccgcgtgattctctatctgcacggcggcggctataccgcgggcgggctggactacgcaaagggctttggcgcgctgctcgcggcgcagacgcacgtgaccgtgctctgcatcgcctatcgcctcgccccggagcacaaattccccgccgcgcaggacgacgcgatggacgcgtatcaatacctgctcgactccggctatgcgccggacaagatcgccgtcgcgggcgaaagcgcgggcggcggcctcgcgctgagcctcgtactgcgtctgcgggacgaggggaaaccgcttccctcctgcatcgtcgcgatttcgccgtgggcggacctgacgctctccggctcttcctacaacaacaacgtccgcctcgacccgacgctgatccgcgaatcgcttgcgtattatgtgatcgcctacgccgcggggcacgaggacgaggcgtacgtttcccccgtactgggtgactttaccaagtttccgccgacactgctctttgccggcagcgacgaaatcctgctttcggacgcgaagaccgtctacaagcgcctgaaaaaagcaggtgtggagagcaagctcgtcgtggaagagggcatgtggcacgtctacccgctctatggcacgccggaaggcaagaaggcgctttcagagatggcgctcttcctccgctcccgattgggattggaagagctctccgccgcgcaaaagcaggagcttcccgcgcaaacgcgcacaaatcccgcgtaa

SEQ ID NO: 820 - protein, 282 aa, Unknown
  Obtained from environmental sample
MTAEILKTKVSFETVEFDRFTACFAESNNCVEPCDRVILYLHGGGYTAGGLDYAKGFGALLAAQTHVTVLCIAYRLAPEHKFPAAQDDAMDAYQYLLDSGYAPDKIAVAGESAGGGLALSLVLRLRDEGKPLPSCIVAISPWADLTLSGSSYNNNVRLDPTLIRESLAYYVIAYAAGHEDEAYVSPVLGDFTKFPPTLLFAGSDEILLSDAKTVYKRLKKAGVESKLVVEEGMWHVYPLYGTPEGKKALSEMALFLRSRLGLEELSAAQKQELPAQTRTNPA

SEQ ID NO: 821 - DNA, 726 bp, Unknown
  Obtained from environmental sample
atgatcggggagcggctggtgcaggaggtggtgccgggggtgcaccgcatcaacctgggtgtggtgaacgcgtacgtgctgcaggcggaggacgggatcacgctcgtcgatacggggatggggaccacgcggccgctgctgctgcgcgggctcgcggcgctgggcatcgacgtccgcgacatccgccgcatcctggtgacgcacgcgcacccggaccacaccggcgcgctggcatccctgaagcgcgcctcgggagcccgggtctacatgcacccggacgacgcggcgctggtccggcaggggcgctcgctgcggcccgggctccgcccgccgccgcgccacctctacacgttcacggtgccgctggtggcgtgggccatccctgggcacgtggaggcggtggagaccgatcagccggtgcgcgacggcgaccatctggaagtcgcgggcgggatgcgcgtcgccgggtttcccgggcactccgcggggcaggtgggctatctgtggcagcggcacgggggcgtgctgttcgccggcgacacggccgccaaccagctggggcggctggacgtggcgatcgtgtacgaggactacgcgcaggggatgcgcgacctggtgaagctcgcatcgctggagtacgacaccgtctgctttggccacggcccgccgatcatcggcggcgcctccgccgcggtgcgccgcaagtggggcccggcgggcgcgtga

SEQ ID NO: 822 - protein, 241 aa, Unknown
  Obtained from environmental sample
  DOMAIN (21)...(220): Metallo-beta-lactamase superfamily
MIGERLVQEVVPGVHRINLGVVNAYVLQAEDGITLVDTGMGTTRPLLLRGLAALGIDVRDIRRILVTHAHPDHTGALASLKRASGARVYMHPDDAALVRQGRSLRPGLRPPPRHLYTFTVPLVAWAIPGHVEAVETDQPVRDGDHLEVAGGMRVAGFPGHSAGQVGYLWQRHGGVLFAGDTAANQLGRLDVAIVYEDYAQGMRDLVKLASLEYDTVCFGHGPPIIGGASAAVRRKWGPAGA

SEQ ID NO: 823 - DNA, 426 bp, Bacteria
atggaatttgaaatcaatggtattcaataccgtacagccaaattgagtgtgttcgatcagctgaaggtgtcacgtaagttgttacccgttcttgccggattagtctctgatattcgcgccgtacagacgatggcccaagacaaaaatatggaaggggcattagagaaggcgctgcctaaaattgcgcaggcggttagcgacttaagcgacgaagattgcaacgcgatcctttacccctgcctgtctgttgtatcacgacaacacggcaagggatggacgcccgtattctcgcagggagtcttgcatttcgatgacatagacttgccaacattgttgcaattagtcgcgagggtgatcggggattcattgggaaattttttgcacgcactccccgccgcagagacgcccttcccgccagcggcctag

SEQ ID NO: 824 - protein, 141 aa, Bacteria
MEFEINGIQYRTAKLSVFDQLKVSRKLLPVLAGLVSDIRAVQTMAQDKNMEGALEKALPKIAQAVSDLSDEDCNAILYPCLSVVSRQHGKGWTPVFSQGVLHFDDIDLPTLLQLVARVIGDSLGNFLHALPAAETPFPPAA

SEQ ID NO: 825 - DNA, 1038 bp, Unknown
  Obtained from environmental sample
atgacaacacaatttagaaacttgatatttgaaggcggcggtgtaaaaggtgttgcttacattggcgccatgcagattctcgaaaatcgtggcgtgttgcaagatattcgccgagtcggagggtgcagtgcgggtgcgatcaacgcgctgatttttgcgctgggttacacggtccgtgagcaaaaagagatcttacaagccacggattttaaccagtttatggataactcttggggtgttattcgtgatattcgcaggcttgctcgagactttggctggcacaagggtgacttctttaatagctggataggtgatttgattcatcgtcgtttggggaatcgccgagcgacgttcaaagatctgcaaaaggccaagcttcctgatctttatgtcatcggtactaatctgtctacggggtatgcagaggttttttcagccgaaagacaccccgatatggagctagcgacagcggtgcgtatctccatgtcgataccgctgttctttgcggccgtgcgccacggtgaccgacaagatgtgtatgtcgatgggggtgttcaacttaactatccgattaaactttttgatcgggagcgttacattgatctggccaaagatcccggtgccgttcggcgaacgggctattacaacaaagaaaacgctcgctttcagcttgagcggccgggctatagcccctatgtttacaatcgccagaccttgggtttgcgactagatagtcgagaggagatagggctctttcgttatgacgaacctctcaagggcaaacccattaagtccttcactgactacgctcgacaacttttcggtgcgttgatgaatgcacaggaaaagattcatctacatggcgatgattggcagcgcacggtctatatcgatacattggatgtgggtacgacggacttcaatctttctgatgcaactaagcaagcactgattgaacagggaattaacggcaccgaaaattatttcgagtggtttgataatccgttggagaagcctgttaatagagtggagtcatag

SEQ ID NO: 826 - protein, 345 aa, Unknown
  Obtained from environmental sample
  DOMAIN (8)...(195): Patatin-like phospholipase
MTTQFRNLIFEGGGVKGVAYIGAMQILENRGVLQDIRRVGGCSAGAINALIFALGYTVREQKEILQATDFNQFMDNSWGVIRDIRRLARDFGWHKGDFFNSWIGDLIHRRLGNRRATFKDLQKAKLPDLYVIGTNLSTGYAEVFSAERHPDMELATAVRISMSIPLFFAAVRHGDRQDVYVDGGVQLNYPIKLFDRERYIDLAKDPGAVRRTGYYNKENARFQLERPGYSPYVYNRQTLGLRLDSREEIGLFRYDEPLKGKPIKSFTDYARQLFGALMNAQEKIHLHGDDWQRTVYIDTLDVGTTDFNLSDATKQALIEQGINGTENYFEWFDNPLEKPVNRVES

SEQ ID NO: 827 - DNA, 879 bp, Unknown
  Obtained from environmental sample
atgtctaaatcattacaatatcccattattctcgttcacggtttcagtggttttgataaagttgctggagtctatccttactttttcggtattcagccagcactggaaaaagccggagcaacggtattcgccgcctctctatcggcagaaaacagcaatgaagctcgtggtaagcaattgctcaattttgtaaaacaagtcacccagttaaccggagcagccaaggtcaacctgattggccacagccagggcccgttagcctgtcgctacgtcgccgccattcatcccgaactggttgcgtctgttacctccgtgaatggggcaaattttggctcggaaattgccgatctagtccgtttggcggtgaaaccaggctcccttccagaagctattgcaggcgcagtgatgaacgcttttggttcattcctttcccttatgactggccgcccttccctgccacaagacagtgtcgcagcgcttaactcgctcaccagcgaaggcgtcgctaaattcaatgccaaatatccgcagggtttaccaagcaattggggaggagaaggtaaagagtttgagaatggtgtttattattattcttggggtggggtaattaattacaacccgattgagcaagggctcaataattttgatccattgcatacctccatggttgccctctcatttctgttcacaaaagaacgtttccaaaatgatgggttggttgggcgttatagtatgcatctcggcaaagtgatccgctccgattactcaatggatcacctggatgctatcaatcaaactgcgggggttgttaccagcagtaccaaccccgttcaactctttgttgatcacgtggcacgtttaaaatcgaaagggttataa

SEQ ID NO: 828 - protein, 292 aa, Unknown
  Obtained from environmental sample
  DOMAIN (18)...(272): alpha/beta hydrolase fold
MSKSLQYPIILVHGFSGFDKVAGVYPYFFGIQPALEKAGATVFAASLSAENSNEARGKQLLNFVKQVTQLTGAAKVNLIGHSQGPLACRYVAAIHPELVASVTSVNGANFGSEIADLVRLAVKPGSLPEAIAGAVMNAFGSFLSLMTGRPSLPQDSVAALNSLTSEGVAKFNAKYPQGLPSNWGGEGKEFENGVYYYSWGGVINYNPIEQGLNNFDPLHTSMVALSFLFTKERFQNDGLVGRYSMHLGKVIRSDYSMDHLDAINQTAGVVTSSTNPVQLFVDHVARLKSKGL

SEQ ID NO: 829 - DNA, 735 bp, Unknown
  Obtained from environmental sample
atggcactgttcgttctcgtccacggagcttggggcacgcccaccgagctcgccccggtcgaaccggcgctcacggcggcggggcacgaggtccgaatcgtcgacctgccctgcaccgaccccgacgccaccttccacgactacgccgaggcggtgatcgcccagttgggcccgcccgagcgcgaccccgagaccctgctcgtcgggcactcgttcggcggcgcgaccatcggtctggtccgcgaacgccggcccgacgtggcgctggtgtacgtcacggcagtggtgctcgaacccggccagtcgctgctcgagttgttcttcggctccgatccgttcgacgaccccgacgtggacgacccgtgggagggcttcgaagggctggtgctcgacgccgggccgggcctcacccgggtcgacctcgacgtgttggccgccggggtacccgaggaccagcgcgccgagttgctcgctgccctcgaaggcacccagcgcgagcagggcatcgcggtcatgcgggagggctggccgggcgcgtcggtgccgagcggttgggtcagctacatcgtggcgaccgccgacacgctgctcgagcccgacctgcagcgcccgatggccgacatgctcggggccgacgtgtacgaggtgcactccgaccacgaggtgttcatcgagcagcccgaagagttggcgaagatcctcgacgacctcgccgccggcctcaccagccgatga

SEQ ID NO: 830 - protein, 244 aa, Unknown
  Obtained from environmental sample
MALFVLVHGAWGTPTELAPVEPALTAAGHEVRIVDLPCTDPDATFHDYAEAVIAQLGPPERDPETLLVGHSFGGATIGLVRERRPDVALVYVTAVVLEPGQSLLELFFGSDPFDDPDVDDPWEGFEGLVLDAGPGLTRVDLDVLAAGVPEDQRAELLAALEGTQREQGIAVMREGWPGASVPSGWVSYIVATADTLLEPDLQRPMADMLGADVYEVHSDHEVFIEQPEELAKILDDLAAGLTSR

SEQ ID NO: 831 - DNA, 2430 bp, Unknown
  Obtained from environmental sample
atgcgaaagggtatcgtggcatgcatcgccgcagtgatgatccaggtcctggcggccttcggggcgctcgcggcctcccgggtttatctccccgaagccgctttcgtccgggagcagctcgcgacgcgcgaagcggtccccgcggcggagctcggctcggtcctgggattttccagtcgggaggggctgcgcctcctcgccgagaacacggacgaaaacgacgtcacccactcccgctacgtgcagctcttcgacggggtccccgtctggggctaccacatcatcgccgccaccgatgaggacgattccctcgtgagcctccacggcacgcgggtggccgacatcgaggcggacatcgccccggagctactcgccgcgcggccgctcaagacggagcgtgaaatgctcgccgcgatgaagcggcgccatgccgccaagagcctggccggcggcgggcggctgatcttcgaaaacgaggtgagcgagaaggtgatctacgtgggcgaggacggccgggcgcgcctgtgcttccacgtctccttcttcgccgacgcggccgagggcggaagcccctcgcggccggtgatcctggtggacgccgtgaccgaggagatcgtgctcgagttcgaggggctgacccacgccgagggcaccggcccgggcggaaacgtgaagatcggaaaataccgctacgggaccgactatccgcccttcgaggtgaccccgtccggcggcaactgcgtcatgaacaacgccaacgtgaagacggtcaacctgaaccacgggaccagcggctcgaccgcctaccagtacgcctgctacgagaacaccttcaaggagatcaacggcggctactcgccgctgaacgacgcccacgccttcggcgccgtcgtcttcgacctgtacaagcagtggttcaacaccgcgcccctcaccttccagctcatgatgcgcgtccactacagcacgggctacgacaacgccttctggaacggctcgtcgatgaccttcggcgacggcaagacctatttctatcccctggtctcgctcgacgtcgtcgcccacgaggtgagccacggcttcaccgagcagaactccaagctcatctactccaaccagtccggcggcatcaacgaggccttctccgacatggcgggcgaggccgcggagttcttccaccggggcaaaaacgacttcatggtgggctatgacatctggaagctcagcgccaccggcgcgctgcgctacatggacaacccgccgaaggacggcaaatcgatcggcagcgccaaggattacacggccggcatggacgtccactactcgagcggggtcttcaacaaggccttctgggcgctcgcgaccaccccgggctgggacaccaagaaggccttcgccgtcttcgtcaaggcgaaccagaactactggcagcccagcaccaacttccagcagggcgccgagggggcgcgcgacgcggccatcgcgctcggcttctccgcccaggcggtgaaaaacgccttcgccaaggtcgacatcacgatcgacgccccgccggacatcccgccgctcgttgagatcctgagcgtctcgaccggcaaaacgtacgcgctcggcgcggcgcaggtcggctccaggccgtacatcgaccgcacctacacgatcaaaaagatcggcgccgggcttgccggcggggtgctcgtccagaccgccaacgacgacaagaaggtcgccgtcgcaagccacctcaagctcaaggccctcaaggacatcgtcctctacgccgcctacgacaagcgcggccaggcgaagccgcccacctggctcgccgcctggcagccgaccatcgaggcgctggagaccaccgacgccgacgcctcgccgatgaaggtcttcaagaagagcttcgccgccggcgccgagatcaccctgggcggcaacctccagggcggggacaacggcgcgcagagcaactacttcctcgtcgcgcggccgctcgagacgacgctcgtcgacatcctctcggtctccaccggcaaggcctacgcgctcaccgccgccaaggccggcgccaaggcctacatcgaccgcgactacaccgtgaccgccctctccgcggggcttgccggcgggctgctcgtccagaccgccaacgacgacaagaaggtcgccgcggcgagccacctcgtgctcaaggccaaccgggcggcggcgatctatgtcgcctacgaccggcgcgcgaccaagctgccggactggcttgccgccggctggacggcgaccgccgagtcgctcgggacgaccgacagcggcgcttcgccgctcaaggtctacaagaggaccgtcgccgccggcgcccagatcaccctgggcgggaacatggccgccggcgccgccggcgccgaaagccactacctcgtcgtcgtcaaatag

SEQ ID NO: 832 - protein, 809 aa, Unknown
  Obtained from environmental sample
  SIGNAL (1)...(24)
  DOMAIN (221)...(364): Thermolysin metallopeptidase, catalytic domain
  DOMAIN (366)...(512): Thermolysin metallopeptidase, alpha-helical domain
  DOMAIN (37)...(210): Thermolysin metallopeptidase, propeptide
MRKGIVACIAAVMIQVLAAFGALAASRVYLPEAAFVREQLATREAVPAAELGSVLGFSSREGLRLLAENTDENDVTHSRYVQLFDGVPVWGYHIIAATDEDDSLVSLHGTRVADIEADIAPELLAARPLKTEREMLAAMKRRHAAKSLAGGGRLIFENEVSEKVIYVGEDGRARLCFHVSFFADAAEGGSPSRPVILVDAVTEEIVLEFEGLTHAEGTGPGGNVKIGKYRYGTDYPPFEVTPSGGNCVMNNANVKTVNLNHGTSGSTAYQYACYENTFKEINGGYSPLNDAHAFGAVVFDLYKQWFNTAPLTFQLMMRVHYSTGYDNAFWNGSSMTFGDGKTYFYPLVSLDVVAHEVSHGFTEQNSKLIYSNQSGGINEAFSDMAGEAAEFFHRGKNDFMVGYDIWKLSATGALRYMDNPPKDGKSIGSAKDYTAGMDVHYSSGVFNKAFWALATTPGWDTKKAFAVFVKANQNYWQPSTNFQQGAEGARDAAIALGFSAQAVKNAFAKVDITIDAPPDIPPLVEILSVSTGKTYALGAAQVGSRPYIDRTYTIKKIGAGLAGGVLVQTANDDKKVAVASHLKLKALKDIVLYAAYDKRGQAKPPTWLAAWQPTIEALETTDADASPMKVFKKSFAAGAEITLGGNLQGGDNGAQSNYFLVARPLETTLVDILSVSTGKAYALTAAKAGAKAYIDRDYTVTALSAGLAGGLLVQTANDDKKVAAASHLVLKANRAAAIYVAYDRRATKLPDWLAAGWTATAESLGTTDSGASPLKVYKRTVAAGAQITLGGNMAAGAAGAESHYLVVVK

SEQ ID NO: 833 - DNA, 1140 bp, Unknown
  Obtained from environmental sample
atgctcgccatgcagcgggagaccagcgtctcgatgtcgcagcgcacgacgcgggccgtcggcgtcgcagcggccctcgccctcctcgtgggcttcccgtctgccgcgcagcagcctggcgccgggccgagcgtgatcgatctcatgatccagtcgcgcagccaggagcagccgcagccgagcgcccggcacatctccctgccggccggtaatccgctcgaggtgctgcacgtccacggccagatctacatgattgccggcggcccggccaacgtggccgtgcagatcggaccggagggcgtgctgctggtcgacacggcgaccgaggatctgagcgagcacctgctgcaggccgtgcgcgtcctgtccgacggtccgatcagttacatcgtcaacacgacccccgatcggagtcattacggcggcaacgcggtcctcagcgccgccggacggaatccgacgacggccgagcgcgacctgacaggccacgtcgccggcctcgccgcaggcgaccgccgcgacgacacgccgggcggcggacccggggcggcgatgcgcccgaccggtgcgatcgttttcggacacgagaacgtgctcctccgcatgagcgccgccaccgagccgttcgcgctgtggccgaccagcaccttcttcacgcgcctgaagaccttctcgttcaacgacgagccgatcgaattgctgcatcagccggcggcgcacacggacggcgacctcatggtgtttttccgcaggtccgacgtcctggccgtgggtccgctgatcgacacgctgcagtatcccgtcttcgacgccgcgcgcggcgggagcatgcgaggcatcctcgacggcctgaacgagatcatccgcatcaccgtgccgcgcttcaaccagatggccgggacccgcgtcgtccccgggcgcggccgcatcctgaacgaagccgacgtcgtcgagtaccgcgacatgatgacgatcgtctacgagcgggtccgcgacgcagcgaaggacggcacgtcgctcgccgagatcacgaggatgcagccgacgctcgagtacgacccgctgtactccgtccccggatggaccggcgagatgctcatcgaggccatctatgaggaggtgcgccggcagggggcgtag

SEQ ID NO: 834 - protein, 379 aa, Unknown
  Obtained from environmental sample
  SIGNAL (1)...(36)
MLAMQRETSVSMSQRTTRAVGVAAALALLVGFPSAAQQPGAGPSVIDLMIQSRSQEQPQPSARHISLPAGNPLEVLHVHGQIYMIAGGPANVAVQIGPEGVLLVDTATEDLSEHLLQAVRVLSDGPISYIVNTTPDRSHYGGNAVLSAAGRNPTTAERDLTGHVAGLAAGDRRDDTPGGGPGAAMRPTGAIVFGHENVLLRMSAATEPFALWPTSTFFTRLKTFSFNDEPIELLHQPAAHTDGDLMVFFRRSDVLAVGPLIDTLQYPVFDAARGGSMRGILDGLNEIIRITVPRFNQMAGTRVVPGRGRILNEADVVEYRDMMTIVYERVRDAAKDGTSLAEITRMQPTLEYDPLYSVPGWTGEMLIEAIYEEVRRQGA

SEQ ID NO: 835 - DNA, 1263 bp, Unknown
  Obtained from environmental sample
atgcgttggatgatgaaatccgcgattggaatcgtagtcagtctcatgttagtcagctcgggcctcgttgcagaaacgccgagggcgaagccggaagacgtcgggatttcctccgagcgcctgcgccggatacacgatctgatgcagaggcacatcgatgccggaagcttttcagggtccgtcactcttgtcgctcgcaacggacggatcgcgcacctcgaggcgcaaggcttgatggacatcgaaacacggaagccgacggcgccggatgcgattttccgcattatgtcgatgaccaaacctgtggtgggcgttgcgatcatgtcgctggtcgaggagggcaaagttcggctcaacgatccggtttcccgattcttacctcaattcaaagatctgagagtcgccgtcgtccagcccgccgccgcaggcgggcaacgaggaggtggaacaccggcggaagtccggttctacaccgttcctgtcgagcgcgaaatcacgatcaaagatcttctcacgcatacctccggcatggtgagtgggaccatcagcagtcaggaaagccgaaaagtcgccttgagggagaacgagtcgaatgccgatttcgtcccgcgtctggcgacagttccgctggaattccaaccgggatcgcggtgggcctatagcgcgacggcggcctgggacaccatggttctgatcgtcgaggtggcttcgggacagaagttcgaccagttcgcgcagcagcggatcttcgggcctttgggaatgaaagacacgttcttctatccggccgaatcgcacaactcccgcatcgcgacgctgtactcgcgaaccgagaagggcctgcaacaggccgcaaacccgaatttcatgaacggcgtctacttttccggcggcggcggcctctacagcacggccgaggattacgtgcaattcggcatgatgcttgtcaacggcggcgagtggaatggaaagcgagtgctcagcccgcgttcggtcgagatgatgcggtccgtctttatcccggacacgctgccgggccgtcctcgcggcgaaggtttcgggctgagcgtgcgcgtcgtgaacgacccgctgcaacgcggcacggcgctttcggccggaagtttcggctggagcggcgccttcggtacgcatttctgggtggatccgaaagaaaaagtcgtcgcgattctgatgacgcagacgtcgactccgggactgaacctcgatttcgagaacgccgtgatgcaagcgatcgtgcagtag

SEQ ID NO: 836 - protein, 420 aa, Unknown
  Obtained from environmental sample
  SIGNAL (1)...(24)
  DOMAIN (44)...(420): Beta-lactamase
MRWMMKSAIGIVVSLMLVSSGLVAETPRAKPEDVGISSERLRRIHDLMQRHIDAGSFSGSVTLVARNGRIAHLEAQGLMDIETRKPTAPDAIFRIMSMTKPVVGVAIMSLVEEGKVRLNDPVSRFLPQFKDLRVAVVQPAAAGGQRGGGTPAEVRFYTVPVEREITIKDLLTHTSGMVSGTISSQESRKVALRENESNADFVPRLATVPLEFQPGSRWAYSATAAWDTMVLIVEVASGQKFDQFAQQRIFGPLGMKDTFFYPAESHNSRIATLYSRTEKGLQQAANPNFMNGVYFSGGGGLYSTAEDYVQFGMMLVNGGEWNGKRVLSPRSVEMMRSVFIPDTLPGRPRGEGFGLSVRVVNDPLQRGTALSAGSFGWSGAFGTHFWVDPKEKVVAILMTQTSTPGLNLDFENAVMQAIVQ

SEQ ID NO: 837 - DNA, 207 bp, Unknown
  Obtained from environmental sample
atgccccggggctctctcgtcccgctcgtcaccccgttccgcaacggtgagatcgatcgctccgccttcgcggacctcgtcgagtggcagatcgacagcggcacgcacggtctggtcattggcgggacgaccggcgaacccgcggccttgacgctggaggagcgggagttcctgatccaggaggcggtccgcctggcgcgtgggcgg

SEQ ID NO: 838 - protein, 69 aa, Unknown
  Obtained from environmental sample
MPRGSLVPLVTPFRNGEIDRSAFADLVEWQIDSGTHGLVIGGTTGEPAALTLEEREFLIQEAVRLARGR

SEQ ID NO: 839 - DNA, 1074 bp, Unknown
  Obtained from environmental sample
atgagagtagaagagatggtactgaatggggaaagaaatgtaacattaacagcttatatccaggaagttgccggagagtttcgcaatattgaaaagcggccggcaatattgatccttccggggggagggtaccagttttgctcggacagagaggctgatccggtggcaatgccctttttaaaagccggatttcaggtttttatcttaaggtattcagtgaaagaagatgccgtctggcccaatccgctggatgattatgaacaggctatggaattgatacgctccaaagaggaggagtggaaattgtatgccgataaggtggcggttattggattttccgcaggcgggcatttggcgggctgtgcggctgcgatgtcaaagaatcgccccaatgctgcagttttgggatatgctgtgctgggagaggatgtcaaaggctgcaatgtgagtgctccggatgtgattgcgtcagtggatgccgatacctgcccctgcttcgtatttgcgacgcgtacggataatgtagttccgattgaaaactccaccagatttctgacggctttggccgatgcaggcatcgcatttgaaagtcatatttatagttatgggcctcatggattttcaacatgcgattcatctgtacaggcgctggatggaattacaaaaagagcgcccgggtgggttaatgatagtattggctggctaaaagaaatccttggagattttggtgagaacggccttgaagcgccgaagtgcccagcgagagtgaacgatgataacatgccttatttatcagtggactgcagctttaagcgtttgcagcaggttcccgccgcaaagcagatattggatgggattttccaaaacatgcggagcagtgcggctgaacagtatgcagataatcctatgatggatcttatgagcgagaatacagaaggcggcggtctgttttcaatagtaagaaatatgactttaagagatatattaagctttggacgggtgacagatgacattgtggccgcaattaatagtcaacttgagaagatacctaatgtaagtaaagcatcaaattga

SEQ ID NO: 840 - protein, 357 aa, Unknown
  Obtained from environmental sample
MRVEEMVLNGERNVTLTAYIQEVAGEFRNIEKRPAILILPGGGYQFCSDREADPVAMPFLKAGFQVFILRYSVKEDAVWPNPLDDYEQAMELIRSKEEEWKLYADKVAVIGFSAGGHLAGCAAAMSKNRPNAAVLGYAVLGEDVKGCNVSAPDVIASVDADTCPCFVFATRTDNVVPIENSTRFLTALADAGIAFESHIYSYGPHGFSTCDSSVQALDGITKRAPGWVNDSIGWLKEILGDFGENGLEAPKCPARVNDDNMPYLSVDCSFKRLQQVPAAKQILDGIFQNMRSSAAEQYADNPMMDLMSENTEGGGLFSIVRNMTLRDILSFGRVTDDIVAAINSQLEKIPNVSKASN

SEQ ID NO: 841 - DNA, 1689 bp, Unknown
  Obtained from environmental sample
atgggattgttcgattacaaaaatgccgacggcaaagcgctgtacagcgacgccatcgccctgacgctgtatgcctacacgccgaccgggcaggcattgcccggcaccggctggaagccgatcggcgccacggcgctgggctatcagggcaaggtcggggcgcagggcacgtttttcggcgagaaggacggcttcaccagcgccgaagccgaagtgctcggcaagtacgacgccgcgggcaaactgatcggcatcggcgtggcttttcggggcaccggcgggctgggttacagcgacaccttcggcgacatgaaaaacaatctgctggccgccatcggcccgacggattacgccacccagtacgcgaaaaacgccttcgacaacctgctcaagtcggtagccgctttcgctgtcgcccacggcatcgcggccaaggacgtgctggtcagcggccacagcctcggcggtctcggggtcaacagcgtggcggagttgagcgcgagcaactggggcgggttcttcaaggacgccaactacatttcgttcgcctcgccgacccagagcagcaccggcaccaacgtgctgaacatcggttacgagaacgacccggtgttccgcgtactcgacggcaccacgttcagtaccgcgtcgatgggcaagcatgacaagccgcacgattcgaccaccgacaacatcgtcaacttcaacgacaactacgcgtccaccgcgcagaacctggtgccgttcagcatcgccaatccgctgaactggtcggcccacagctcgctggggtatgccgacggcctgaaccgggtgatcgcgtcgaagttctacggcctgacccacaaggattcgacgatcatcgtctccaaccttgagcaagcgtcgcggggcaagacctgggtcgaggatctgggccgcagcggcgagccgcacaccggcagcaccttcatcatcggcaccgacagcggtgactggctcaagggcggggcgggcaacgacttcctcgaaggcctgggcggcgatgaccgtttccgtgacgacggcggtttcaacatcctgctcggtggccagggccacaacaccttcgagctgcaaaagccgttgcagaacttcagcttcgccaacgatggcgacggcacgctgtacgtgcgtgacgcctatggcggcatcagcatgacccgtgacatcggcgcgctggtgagcaaggagtcaggctcgtggtggggcagcaaggaaatcacctggaccgtcaccgccaaaggcctggccaacggtgccgaactgacccagtacaaccattcgctcagcggcggcgccatgggcgacaccctgaaagccaccgctgacggcgactggctgttcggcctgggcggcaacgatcacctgcaaagcgacaaggcccacgtgacctttgtcggcggcgccggtaacgacgtgatgagcgcggtgggtggcaacaacactttcctgttcagcggggcgttcggcttcgacgcgatcaatggctaccagggcagcgacaaactggtgttcatgggcgtcgaaggcgcagggcagggctacgactacaagcaacacgcgtcgcagtccggaagcgataccgtgctgaagattggcgactttgccgtgacgctggtcggggtcggtgtggctaacctgtcggattcgagtttcgtcttcgcctga

SEQ ID NO: 842 - protein, 562 aa, Unknown
  Obtained from environmental sample
  DOMAIN (82)...(212): Lipase (class 3)
MGLFDYKNADGKALYSDAIALTLYAYTPTGQALPGTGWKPIGATALGYQGKVGAQGTFFGEKDGFTSAEAEVLGKYDAAGKLIGIGVAFRGTGGLGYSDTFGDMKNNLLAAIGPTDYATQYAKNAFDNLLKSVAAFAVAHGIAAKDVLVSGHSLGGLGVNSVAELSASNWGGFFKDANYISFASPTQSSTGTNVLNIGYENDPVFRVLDGTTFSTASMGKHDKPHDSTTDNIVNFNDNYASTAQNLVPFSIANPLNWSAHSSLGYADGLNRVIASKFYGLTHKDSTIIVSNLEQASRGKTWVEDLGRSGEPHTGSTFIIGTDSGDWLKGGAGNDFLEGLGGDDRFRDDGGFNILLGGQGHNTFELQKPLQNFSFANDGDGTLYVRDAYGGISMTRDIGALVSKESGSWWGSKEITWTVTAKGLANGAELTQYNHSLSGGAMGDTLKATADGDWLFGLGGNDHLQSDKAHVTFVGGAGNDVMSAVGGNNTFLFSGAFGFDAINGYQGSDKLVFMGVEGAGQGYDYKQHASQSGSDTVLKIGDFAVTLVGVGVANLSDSSFVFA

SEQ ID NO: 843 - DNA, 1032 bp, Unknown
  Obtained from environmental sample
atgcgcctgaacgtttttttgcgccccttggtctgtttgagtctgcttggccttgccgcctgcggcagcaatccccccagccccgcagcgacacccgagccgcccaccgcaaccacatcagcccccccgatcaagatcggcctggcgctgggcggcggtgcggccaagggctttgcccatatcggcgtcatcaagatgctcgaggccaatggcctcacgccctcgttcgtggccggcaccagcgccggcagcgtggtgggtgcgctctatgcaagcggcatgaacgccttcgagctgcaggaaaaagccgtggcgctggacgaagccaagatccgcgacctgcagctgtccgctggcggtctggtactggggcagaagcttgaggactatgtgaatgaacaagtccaccgcaagccgctggagcagatgaccaagccctttgtcgccatctccacgcgcctggaagacggtgaacgcacggtgtttgcacgtggcaatgtgggccaggccgtgcgcgcctccagcagcgtgccgggcgtgttccagcccgtcaccatcggcaagtaccactatgtggacggcggcattgtcagccccgtgccggtcgatgccgtgcgcaatctgggggccgacatcgtgattgccgtggacatctccaacaaggccagcggcaagaccccggccaatatgctgggcgcgctcaatcagtcgattgccatcatgggccagaagctgggtcaggccgagctggcgcgagccgacatcatcattcgtcccaaggtgctggacatcggcccggccgacttcgcgcagcgcagccatgcgattgtggaaggcgagaaggccgccactgcactgatgccgcagattcgcgaacgcatcgcccagctgcgcgccgaacgcgccaaggccactcaggtagcgcagcaaaaggccgccgaagccagctatcaggactgcctgaagcagcgctccagccttcaaaagctgtccggcatggtgggcatgagcggcaactgcgaaaagccctga

SEQ ID NO: 844 - protein, 343 aa, Unknown
  Obtained from environmental sample
  SIGNAL (1)...(29)
  DOMAIN (48)...(206): Patatin-like phospholipase
MRLNVFLRPLVCLSLLGLAACGSNPPSPAATPEPPTATTSAPPIKIGLALGGGAAKGFAHIGVIKMLEANGLTPSFVAGTSAGSVVGALYASGMNAFELQEKAVALDEAKIRDLQLSAGGLVLGQKLEDYVNEQVHRKPLEQMTKPFVAISTRLEDGERTVFARGNVGQAVRASSSVPGVFQPVTIGKYHYVDGGIVSPVPVDAVRNLGADIVIAVDISNKASGKTPANMLGALNQSIAIMGQKLGQAELARADIIIRPKVLDIGPADFAQRSHAIVEGEKAATALMPQIRERIAQLRAERAKATQVAQQKAAEASYQDCLKQRSSLQKLSGMVGMSGNCEKP

SEQ ID NO: 845 - DNA, 708 bp, Unknown
  Obtained from environmental sample
atgtcgcttcgctctgcttttcgtcgtcgtctcttgagtgcgatgataacggttgggttcctcaaccggttatcgaacagtctggcgctggccaaccccgacccggggaacccggagcgccccaccgcgccgcgcgcccaggcggcgacgctcctcgtcttcggcgacagcctctcggcgggctatggtctgcgcgccggtaacggttgggtcgatctcctcgcggagcggctgcaagcgtgcgcgccgcagtggcgcgtggtcaacgccagcgtttcgggggagacgacccacggcggccgggtgcggctaccgaaactgctcgcccgcgagcgagcccggttggtgatccttgaacttggcgcaaacgacggattgcgcggtctgtcgctcacggcgatgcgggaaaacctggctgcgatgatcgacgccgcacaccgtgctggcgcgcaagtggtgctcgttggcatgcagatcccgccaaaccttggccccgactacagcgaagcgttcgccgcgacctttgcggaattggcagcggaaaaacgggtagccggtttcgttccattccttttggcgcccattgcgctcaaccgtgacgcgttccaagccgatgggctccaccccaccgcggaagcgcagccgctgcttctcgaaacggtctggccggtggtggcaccgctcgttggctgcacgaccgcgccgtga

SEQ ID NO: 846 - protein, 235 aa, Unknown
  Obtained from environmental sample
  SIGNAL (1)...(31)
  DOMAIN (51)...(221): GDSL-like Lipase/Acylhydrolase
MSLRSAFRRRLLSAMITVGFLNRLSNSLALANPDPGNPERPTAPRAQAATLLVFGDSLSAGYGLRAGNGWVDLLAERLQACAPQWRVVNASVSGETTHGGRVRLPKLLARERARLVILELGANDGLRGLSLTAMRENLAAMIDAAHRAGAQVVLVGMQIPPNLGPDYSEAFAATFAELAAEKRVAGFVPFLLAPIALNRDAFQADGLHPTAEAQPLLLETVWPVVAPLVGCTTAP

SEQ ID NO: 847 - DNA, 408 bp, Unknown
  Obtained from environmental sample
atggcgctgatcgtcctcgtccatggagcgtggggaacgccggccgagctcgccccgatcgaaccggcactcacggcggcggggcacgaggtccggttcgtcgacctgccctgcaccgatcccgacgccacgttcgacgactacgtcgaggcggtgatcgcccagttggacccgcccgagcgcgaccccgagaccctgctggtggggcactcgttcggcggcgccaccatcggtctggtccgcgagcggcgacccgatgtggcactggtgtacgtcacggccgtggtgccggaaccggccagtcgctgctcgagatgctgctcggctccgatcccttcgacgaccccgacgtcgacgatccgtgggcggccctcggcggactcgtgctggacgcggggccggggttga

SEQ ID NO: 848 - protein, 135 aa, Unknown
  Obtained from environmental sample
MALIVLVHGAWGTPAELAPIEPALTAAGHEVRFVDLPCTDPDATFDDYVEAVIAQLDPPERDPETLLVGHSFGGATIGLVRERRPDVALVYVTAVVPEPASRCSRCCSAPIPSTTPTSTIRGRPSADSCWTRGRG

SEQ ID NO: 849 - DNA, 747 bp, Unknown
  Obtained from environmental sample
atgaaaattaaattgccagaaccatttacatttgaagcaggaaatcgagcagttttattattacatggatttactggccattcagcagatgtaagaatgcttggccgttatttagagaagaaaggttacacaacccatgcaccaatttatagagggcatggtcaagaaccagaagcgttactacactcatcacctgatgaatggtgggaggatattttaacagcttataatcatttaaaaaatctaggatataatgaaattgctgttgctggtctttcgatgggtggtgctttagcacttaaattagctattaaatatgagttaaaaggtgtcattcctatgtgtacaccaatgtattttgataatcaaaaacagttaactcaagcatttttatactttgcacgacaatttaaaaaatttgagaaaaaagatgaacaaacaattaaaaaagaagtagatttactacaacaaaattcagcagaattatttaatgaaatcggcacttttgtagaacaagtcaatggtataatagatagagttgacattcctacattcgtagttcaagcaagtaaagatgaaataataaatcctgaaagtgcaacatttatttatgaaaatattaaaaatgagaaaaaagatttaaaatggtatgaaaattctactcacttgataacattcggagatgagaaagatatcttacatgaagatatctataattttttagaaacattagattggaacaactaa

SEQ ID NO: 850 - protein, 248 aa, Unknown
  Obtained from environmental sample
MKIKLPEPFTFEAGNRAVLLLHGFTGHSADVRMLGRYLEKKGYTTHAPIYRGHGQEPEALLHSSPDEWWEDILTAYNHLKNLGYNEIAVAGLSMGGALALKLAIKYELKGVIPMCTPMYFDNQKQLTQAFLYFARQFKKFEKKDEQTIKKEVDLLQQNSAELFNEIGTFVEQVNGIIDRVDIPTFVVQASKDEIINPESATFIYENIKNEKKDLKWYENSTHLITFGDEKDILHEDIYNFLETLDWNN

SEQ ID NO: 851 - DNA, 948 bp, Unknown
  Obtained from environmental sample
atgacccaagtttatgtccgccccgatgtccgccgatttctcgattatctgaacgccctgcccgggccgcgcagccacgaagtggggccgaacgaggcgcggctgatgatgctcgcttcccggcaggtcgccgacgaacccgtgggagagttggcccatgtccgcgatctcgcctgccccggccccggcggcgagataaagctgcggctgttcgacgctcgcgaagagagagagccaggtcccttgctcgtcttcttccacggcggcggcttcgttctcggcgatctcgacacccatgcgcccttctgcgcggagattgcgcgcctgctcgacatgccggtgctcgccgtcgactatcgcctggcgcccgaaaatccctggccagccggcgccgaggattgcatcgccgcggcgcgctgggcggcttccagtcccgacgagctcgggcgagaggtcaccggcctggtcgtcgccggtgacagcgccggcgggaatttcgcgatcgtcgccagcctcgcgctccgcgacgagcctgccgcagtgccggttctcgcccagtggccgatctacccggcggccgatccgaccaagggctatccctcgttcgaggatttcgccgaaggctatttgctgacccgcgacggaatgcaatggttcgaccaatgttatgcggcggatggcaaggactggcgctattcgccgctggtcaagagccaggaaggcatgccgccgaccctggtgatcaccgccggcctggacccgatccgcgaccagggccgcgcctatgccgccgaatgcatccgcgccggcgtgcctaccaccttcctcgaagcgaagggcaatatccacggcttcatcaatcttcggaaggcgatcccatcctcggtcgaggacatcaggggctgcgtcgcggtgctgaagcagatgctggaggagtcggcacgatga

SEQ ID NO: 852 - protein, 315 aa, Unknown
  Obtained from environmental sample
MTQVYVRPDVRRFLDYLNALPGPRSHEVGPNEARLMMLASRQVADEPVGELAHVRDLACPGPGGEIKLRLFDAREEREPGPLLVFFHGGGFVLGDLDTHAPFCAEIARLLDMPVLAVDYRLAPENPWPAGAEDCIAAARWAASSPDELGREVTGLVVAGDSAGGNFAIVASLALRDEPAAVPVLAQWPIYPAADPTKGYPSFEDFAEGYLLTRDGMQWFDQCYAADGKDWRYSPLVKSQEGMPPTLVITAGLDPIRDQGRAYAAECIRAGVPTTFLEAKGNIHGFINLRKAIPSSVEDIRGCVAVLKQMLEESAR

SEQ ID NO: 853 - DNA, 1098 bp, Unknown
  Obtained from environmental sample
atgacgtttgttttgacgatactgggcatcctggctgcggtcgttggcgtgtttctgcttctcgcctggctttttcgtcgcggcgagaatctgtcccgttacgacacgcccgtcgatccggccgcgctcgaatcctgcggtgatccggacggccccagcgcgggccatgccggcgccgtcgcggcgatcgaaaagctgcgcccgcaggccgaagggctctcccgcggcggaatgatccggttcgcccggcaattcatggaggatataccgaccggccgtcggttcgattgcgagtttcggccggtcgaagccgctggcgttcgctgcgaatgggtgctggcgcccggcgcggatccggaacgccgtgtactttacctgcacggcggcgcattcatcgccggcagccctcacagccaccgaacggcgacctgccggttttcgaccgtcgcccgagcggcggtgctggcggtcgactaccgactgatgccggagcattcgcggcaggacctcattcaggactgccaggcggcataccgctggctgctcgaccacgggccgcacgggccggctgcggctcaacgggtgtatttcggcggcgactccgccggcggcaatctcgcgctgacgctgtccaactggacgcgggacgccgggctgcgccagcccgacgccgtcgtggccctgtcgccgttgacggattcgacttacagcagcccgagcatccgcggcaacctggccaccgataccctgatctcgaccctgttcgggcggctggcgcgcgtgccgcaaagcgtgctgacctggatgttcgtgctggataaccgcatccgcccggtcgatcccctggtctcgccgtcgcggggcgacctgtcgggcctgccacccacgctgcttcaggtgagcgaatccgagatgctgtacgacgacgcccgtcgctacgtgaacaaggccgtggcggctggttcaccggcccgtctgcagagctggccgggactgctgcacgtctggcagctgttctaccccgagatccccgaggccgggcaggcctggcgccgggtcggcgagttcatcgaggcggtcgacgcggaaagcgcttag

SEQ ID NO: 854 - protein, 365 aa, Unknown
  Obtained from environmental sample
  SIGNAL (1)...(22)
MTFVLTILGILAAVVGVFLLLAWLFRRGENLSRYDTPVDPAALESCGDPDGPSAGHAGAVAAIEKLRPQAEGLSRGGMIRFARQFMEDIPTGRRFDCEFRPVEAAGVRCEWVLAPGADPERRVLYLHGGAFIAGSPHSHRTATCRFSTVARAAVLAVDYRLMPEHSRQDLIQDCQAAYRWLLDHGPHGPAAAQRVYFGGDSAGGNLALTLSNWTRDAGLRQPDAVVALSPLTDSTYSSPSIRGNLATDTLISTLFGRLARVPQSVLTWMFVLDNRIRPVDPLVSPSRGDLSGLPPTLLQVSESEMLYDDARRYVNKAVAAGSPARLQSWPGLLHVWQLFYPEIPEAGQAWRRVGEFIEAVDAESA

SEQ ID NO: 855 - DNA, 831 bp, Unknown
  Obtained from environmental sample
atgggcattgtgaacgcgggtgcccgtgggttgatcctgcgggcgcttgcggctgtcctggcgttggcgctgggctgctgctgtgtgccggtgcgttccgagcggacgcggaatattgttttcacgccggcggactggccggcggcggttccgggcgatttctatcgtccggcgggggatggtccgtggccggcggtgttgctggtgcatggcggcggttggtcgggcggcgatacccgctggcacatgaaccggatcgcgcggaagctggcgcgccggggatattttgttttaaatgtcacctaccggcagtcaccggagtggacctatccggcagcggtggaggatgtgcgggagggatttcagtggttgcggcgcaactcgcgggagcaggggatcgatccggagcggatcgccattttcggttattcggccggcgggtatctggggtcgatggtggccttgcgggacaaccccggcgtgcgggcggtggtggcgggcggaacgccgttcgatctgagtttttatcgggacggcgatctggtggcggattttcttggagcgagatattatgaagagccggagcggtttcatgaagcatcgccggtgaatcatgtgaaacccgacagtccgccatttttcatttatcacggggagaatgacagtttggtgaaaccggagcacccgcatgcgatgattgcggagctggcaattcaccaggttcctcacgaggttttctggatcccgggacgcgggcacatcggagcgttttttcgtcccgcgggcgcggtggatggggcgatcgatttcctggacaggaaattgaagtga

SEQ ID NO: 856 - protein, 276 aa, Unknown
  Obtained from environmental sample
  SIGNAL (1)...(33)
  DOMAIN (50)...(275): Dienelactone hydrolase family
MGIVNAGARGLILRALAAVLALALGCCCVPVRSERTRNIVFTPADWPAAVPGDFYRPAGDGPWPAVLLVHGGGWSGGDTRWHMNRIARKLARRGYFVLNVTYRQSPEWTYPAAVEDVREGFQWLRRNSREQGIDPERIAIFGYSAGGYLGSMVALRDNPGVRAVVAGGTPFDLSFYRDGDLVADFLGARYYEEPERFHEASPVNHVKPDSPPFFIYHGENDSLVKPEHPHAMIAELAIHQVPHEVFWIPGRGHIGAFFRPAGAVDGAIDFLDRKLK

SEQ ID NO: 857 - DNA, 945 bp, Unknown
  Obtained from environmental sample
gtgctggccgcggctgcgaccgcggtcgtcgtgctcgcgacgtcgcacgacgtcgacgcgaacccgaccgtgcggctcgtctgcacggagacgtgcgtcgcgctcgatcccatcccgatccgcggcaaggtcgatctgctcgtgctcggcgacgcgccgccgtcgacgcggttcggcacgcacgcgctgacgtcgacggacggggtgcggcgcgccgacggcgttccggtgtcgtcgctcaacatcgtcggccgcgagccgccgtcgcgcctcgtcgggcccgacatcatcgaggcgggcgacgactccgccgacgacgacgatgacgtcttcgacgatgcggtgctggtcggcggtccgcgcggctatcgctgctcgggcgtcgtcatcgaccccacgcacgtgctcaccgcggcgcactgcgcacctgccacgcacgtcggcatcggcgtcgaggccgaccgcgcgaaacgcatcgacgtgacgcgcagcgatctccatccgcgcctcgacgtcgcgctgctcacgctggcgacgccggtgacggtccacgtgcatcgtcgccgcggcgccggcgataccgccccgccggccggccgcgttcgcatcctcggctacggcgtgcgcgacgcgctgcgcttcaccggcttcggcacccgccgccaggtcgaccttaccgtcgacggctggggctgcccggtcctccgcgccgccgccctcggctgccgctccggcgtcgagatgcacctgcgcgacggcgccggcaacgacacctgcttcggcgacagcggcggccccgtcttcgagtcgaccctcgacggctggcgcctcatcgcgatcacgtcccgcggggcccagcctcgcaaggtcctctgcggcgaaggcggcatctacacccgcatcgaccgcctcgccccctggctccgagaggtcacgtccccatga

SEQ ID NO: 858 - protein, 314 aa, Unknown
  Obtained from environmental sample
  SIGNAL (1)...(20)
  DOMAIN (104)...(308): Trypsin
MLAAAATAVVVLATSHDVDANPTVRLVCTETCVALDPIPIRGKVDLLVLGDAPPSTRFGTHALTSTDGVRRADGVPVSSLNIVGREPPSRLVGPDIIEAGDDSADDDDDVFDDAVLVGGPRGYRCSGVVIDPTHVLTAAHCAPATHVGIGVEADRAKRIDVTRSDLHPRLDVALLTLATPVTVHVHRRRGAGDTAPPAGRVRILGYGVRDALRFTGFGTRRQVDLTVDGWGCPVLRAAALGCRSGVEMHLRDGAGNDTCFGDSGGPVFESTLDGWRLIAITSRGAQPRKVLCGEGGIYTRIDRLAPWLREVTSP

SEQ ID NO: 859 - DNA, 909 bp, Unknown
  Obtained from environmental sample
atggctgttcagattaaacaaggacgcattggctttattggggatgatccaatcgaatcacgccgacaattcgatgcgcaaatgttggcgattttaaataaatcaacatcgattgattcagttgaagatattcgcttaccactacaaagtggaactgttttcgcaagacactatcatcctgcaccaaataaaaaacttccaatgattgtattttatcatggaggaggttttgttgtgggtggtttagatactcatgatgaagcctgtcgactcattgccaaatatgcaaaagtacaagttttaagtattgactatccacttgcgccagaagtgtcgccgcaactcctaattaaatcatgtgaagatgcattagcatgggtttatcaaaaccgccgtcagttgaaaatttataaaaaccgtattgcggttgctggcgatagcgcaggtggaaatattagtactgttgttgcacagcatgccgcaggtaagtcttacgcaccgcaagcacaattacttatttatccagttgtcgatttcaaaagtcgacatccttcattttatgcatatggcgaagggctggtgttaacaagtaaagatgtagactacgttacggattactatgcaacgcagcacaatgttgctttggatgacgcacttatttctccaacttatggcagttttaaaaagcttgcgccagcatacgtgattactgctggacatgacttactgcatgatgaaggtgagatatatagccataagctcagacaaagcggtgttaaagtgcaatacatcgattaccctgaacaaactcacggttttattaatctgactccaatctcgagcaaggctaaacggaatacgatcgaaattgccaaaagcttcagaaagttttgggataagcatcactga

SEQ ID NO: 860 - protein, 302 aa, Unknown
  Obtained from environmental sample
MAVQIKQGRIGFIGDDPIESRRQFDAQMLAILNKSTSIDSVEDIRLPLQSGTVFARHYHPAPNKKLPMIVFYHGGGFVVGGLDTHDEACRLIAKYAKVQVLSIDYPLAPEVSPQLLIKSCEDALAWVYQNRRQLKIYKNRIAVAGDSAGGNISTVVAQHAAGKSYAPQAQLLIYPVVDFKSRHPSFYAYGEGLVLTSKDVDYVTDYYATQHNVALDDALISPTYGSFKKLAPAYVITAGHDLLHDEGEIYSHKLRQSGVKVQYIDYPEQTHGFINLTPISSKAKRNTIEIAKSFRKFWDKHH

SEQ ID NO: 861 - DNA, 1188 bp, Unknown
  Obtained from environmental sample
atgcagcgctggacacttctgttttcattgacgctctgctccgccatgacggcgcccgctgtgtgggccgcacccgtgtgggtcactgcctggacggccgcgcccgcgcccgaccgcaaggacggaacgtccgatgcgccggtacagttcgccgcacagaccgtgcgccaggacatgcgtatcggcagccgtggcgatgcgctgcggctgcgcatcagcaacgagctcggcacggcgcccttgcgggtcgaggacctgcgtgtgggagtgaagaacggcaaggccgcaccgctgccggtaacggtggatggccgcgcggtcatcgaggtgccggtcggagccgcgctgctgagcgacccggtgcggatgccggtggcggcgctgcaggagatcagcgtgagtgcctatttcccgcagcccacccgccccgccgtgcgccgcaccgagctgcgggtcgcagatggcaggcagacagccgtcgccgacagcgtgcggctgagctaccagcagaacgtgttctcggcagtgatggtgcagcgtgatgatcgtccccaggtaatcgtggcgctgggcgattccatcacggaaggcgccaccgcacgccgcggcaccttcaaccagtggccggagcggttggcgcagcgcctgcagcaggcctgcccgaaccggttcgtggtacttaaccagggcatcagcggcaacaagctgcttgaccacggccgcagccacagtgcgctgtcacgattggatcgcgatgtgatcgcggtggccgacgccgatcaggtgatcctgttcgaaggcatcaacgacatccgccacggcggtggcgcgcagccgctgcctggacgcaatgcggcggacatgctgctgggctatcaacaggttgcggcgcggctgcatgcgcacggcatccgcgcctggctgggtacgctgaccccgttcggcggttccgagcgctacgagcccgtgtccgccgccacccgcaccacgatcaaccagtgggcacgcggcggcaacagcggcttcgacggcatcatcgatttcgatgccgcgctgcgtgacccgaaggcagccgaatcgttgcccaacgagatcacccgcgaccatctgcatcccaacgacgaaggctaccggcgcatggccgatgccatcgatctgcgcatgctgggctgcaccacccccgagtga

SEQ ID NO: 862 - protein, 395 aa, Unknown
  Obtained from environmental sample
  SIGNAL (1)...(23)
  DOMAIN (187)...(384): GDSL-like Lipase/Acylhydrolase
MQRWTLLFSLTLCSAMTAPAVWAAPVWVTAWTAAPAPDRKDGTSDAPVQFAAQTVRQDMRIGSRGDALRLRISNELGTAPLRVEDLRVGVKNGKAAPLPVTVDGRAVIEVPVGAALLSDPVRMPVAALQEISVSAYFPQPTRPAVRRTELRVADGRQTAVADSVRLSYQQNVFSAVMVQRDDRPQVIVALGDSITEGATARRGTFNQWPERLAQRLQQACPNRFVVLNQGISGNKLLDHGRSHSALSRLDRDVIAVADADQVILFEGINDIRHGGGAQPLPGRNAADMLLGYQQVAARLHAHGIRAWLGTLTPFGGSERYEPVSAATRTTINQWARGGNSGFDGIIDFDAALRDPKAAESLPNEITRDHLHPNDEGYRRMADAIDLRMLGCTTPE

SEQ ID NO: 863 - DNA, 1038 bp, Unknown
  Obtained from environmental sample
atgacaacccaatttagaaacttgatctttgaaggtggtggtgtaaaaggagttgcttacattggcgccatgcagattcttgaaaatcgtggcgtgttgcaagatattcaccgagtcggaggttgcagtgccggtgcgattaacgcgctgatttttgcgctgggttacacggttcgtgagcaaaaagagatcttacaagccaccgattttaaccagtttatggataactcttggggggttattcgtgatattcgcaggcttgctcgagactttggctggaataagggtggcttctttaatagctggataggtgatttgattcatcgtcgtttggggaatcgccgagcgacgttcaaggatctgcaaaaggccaagcttcctgatctttatgtcatcggtactaatctgtctacagggtttgcagaggttttttctgccgaaagacaccccgatatggagctagcgacagcggtgcgcatctccatgtcgataccgctgttctttgcggccgtgcgccacggtgatcgacaagatgtgtatgtcgatggaggtgttcaacttaactatccgattaaactgtttgatcgggagcgttatattgatctggccaaagatcccggtgccgttcggcgaacgggttattacaataaagaaaacgctcgctttcagcttgaacggccgggccatagcccctatgtttacaatcgccagaccttgggtttgcgactggatagtcgagaggagatagggctttttcgttatgacgaacccctcaagggcaaaccgattaagtccttcactgactacgctcgacaacttttcggtgcgttgatgaatgcgcaggaaaacattcatctacatggcgatgattggcagcgcacggtctatatcgacacactggatgtgagtacgacggacttcaatctttctgatgcaaccaagcaagcactgattgagcaaggaattaacggcaccgaaaattatttcgagtggtttgataatccgttagagaagcctgtgaatagagtggagtcatag

SEQ ID NO: 864 - protein, 345 aa, Unknown
  Obtained from environmental sample
  DOMAIN (8)...(195): Patatin-like phospholipase
MTTQFRNLIFEGGGVKGVAYIGAMQILENRGVLQDIHRVGGCSAGAINALIFALGYTVREQKEILQATDFNQFMDNSWGVIRDIRRLARDFGWNKGGFFNSWIGDLIHRRLGNRRATFKDLQKAKLPDLYVIGTNLSTGFAEVFSAERHPDMELATAVRISMSIPLFFAAVRHGDRQDVYVDGGVQLNYPIKLFDRERYIDLAKDPGAVRRTGYYNKENARFQLERPGHSPYVYNRQTLGLRLDSREEIGLFRYDEPLKGKPIKSFTDYARQLFGALMNAQENIHLHGDDWQRTVYIDTLDVSTTDFNLSDATKQALIEQGINGTENYFEWFDNPLEKPVNRVES

SEQ ID NO: 865 - DNA, 936 bp, Unknown
  Obtained from environmental sample
atgccactcgatcctcaaattcaagcctatctcgatcagatggcggcaatgaatatgcccccgatacatacgatgacgcccgaacaggtacgaatgggaatagcgatgcagcttgcgatggagaacattgagaaagagcaggtggctcgcgttgagaaccgcaccattcccggcccggcgggcgagatacctgtgcgcatctacacgccgcagggcaacgggcctttcccggctctggtcttctttcacggcggcggctgggtgatctgtaacctagacacgcacgatggtatctgccgcagcctggcaaacggcgcggactgcgtggtcgtctcggtcgattaccggctcgcgcccgaacacaaatttcctgccgcgcccgaagattgctatgccgcgacgcaatgggtggcgaagaacgcggcagagttgaacgtggaggcatccaacattgccatcggcggggatagcgcgggcggcaatctcactgccgtcgtggcgcagatggcgcgagatcggggaggcccgcatctcgtcttccagttgctaatctatcccgccaccgatttcaggatgaacacgccctccatcgaagagaacgccaccggctacttcctgacgaaagacgacatgatctggttcacgaaccattacctgaacagcgaagaggataagacgaacccgctggcctcccccctgctggcgagcgatctgagcggcctgcccccggcccttatcatcaccgcccagtacgaccccctgcgcgacgagggtgagttgtacgggcagaaattacgggaagcaggcgtccccgtcaccgtcagccgctacgaaggggttattcatggctttttcggcagcattccctccgataagggcaagcaggccgaggccgaagccagcgccgccctgcgtctggcctttggcaaagcgtag

SEQ ID NO: 866 - protein, 311 aa, Unknown
  Obtained from environmental sample
MPLDPQIQAYLDQMAAMNMPPIHTMTPEQVRMGIAMQLAMENIEKEQVARVENRTIPGPAGEIPVRIYTPQGNGPFPALVFFHGGGWVICNLDTHDGICRSLANGADCVVVSVDYRLAPEHKFPAAPEDCYAATQWVAKNAAELNVEASNIAIGGDSAGGNLTAVVAQMARDRGGPHLVFQLLIYPATDFRMNTPSIEENATGYFLTKDDMIWFTNHYLNSEEDKTNPLASPLLASDLSGLPPALIITAQYDPLRDEGELYGQKLREAGVPVTVSRYEGVIHGFFGSIPSDKGKQAEAEASAALRLAFGKA

SEQ ID NO: 867 - DNA, 1245 bp, Unknown
  Obtained from environmental sample
atgaaggtacccacgacagttttgccgatgaaaggcatgcgcaaaatcttcatcgccgtgctggccgcaggtgcggccaatttgccggcaagcgcactgggatacggtacgcgtgaattgccggttccacaaacggcgagccgggagatgcaggcagtgattgcagccggtctgctgccatactggaacacccatcccagaaccgttcaggaatggaaatcctgggtcgaccagttggcgcaagacactgtccagacgctgcccgcactgcaaaaagcactggatgtcagcgtggagccgttgcagatggctggtgtgccggtcttcatcgtcacaccccggtcggtcgcaccgcaaaaccgccatcgtttgctgatccattttcatggcggcggctatgtattgaaccccggaaaagcgggcacggccgaggccatcatgatggccgggtacggaaaaatccgggttgtttccgtggactaccggatgccgccggattttccctatcccgccgccatcgacgacgcgctgactgtgtaccgcgaaatcattcaaaaacgcagtcccgacacgattggcgtatttggcacttccacaggcggcgcaatgacgctggctttaatgctgcgggcgaaagacgaaaagttgccactgccgggtgccattgctgtcgggaccccttggacggacttgaccaaaacgggagacagctatttcacgaatgacggcgtggataacgtgctggtgcgttatgaaggttggctgggagatgcggcgaagctctatgccggagagcacgatcccaaacacccttacctttctcccgtatatggcgacgtacacggtttgccgcccacgttgctcgtttccggaacgcgcgatttgtttttgagcaatacggtgcgtatgcactggcggcttcgcgatgcggacgtgccagcggatctgctggtttttgaggggctgtcgcacgcccaatacctgatgtctgtgggtgcgccggaaaccagacagtattttgacgcgctttcccggtttttcgatattcgtctcgccggtcctgccgcttcgggagggagagttggaatggaagatggaatggtgcattggagaagcgtattaaccggaacagatcaaaggcaagaggcggatcaattcaaggagaaatacgatgacaatcaagggcgaggtcaaataccccttgtcattgatgactcttcacttgcgaatcaagcttcgatttga

SEQ ID NO: 868 - protein, 414 aa, Unknown
  Obtained from environmental sample
  SIGNAL (1)...(32)
MKVPTTVLPMKGMRKIFIAVLAAGAANLPASALGYGTRELPVPQTASREMQAVIAAGLLPYWNTHPRTVQEWKSWVDQLAQDTVQTLPALQKALDVSVEPLQMAGVPVFIVTPRSVAPQNRHRLLIHFHGGGYVLNPGKAGTAEAIMMAGYGKIRVVSVDYRMPPDFPYPAAIDDALTVYREIIQKRSPDTIGVFGTSTGGAMTLALMLRAKDEKLPLPGAIAVGTPWTDLTKTGDSYFTNDGVDNVLVRYEGWLGDAAKLYAGEHDPKHPYLSPVYGDVHGLPPTLLVSGTRDLFLSNTVRMHWRLRDADVPADLLVFEGLSHAQYLMSVGAPETRQYFDALSRFFDIRLAGPAASGGRVGMEDGMVHWRSVLTGTDQRQEADQFKEKYDDNQGRGQIPLVIDDSSLANQASI

SEQ ID NO: 869 - DNA, 1422 bp, Unknown
  Obtained from environmental sample
atgaaaaagaaattatgtacatgggctctcgtaacagcgatatcttctggagttgttgcgattccaaccgtagcatctgcttgcggaatgggtgaagtaatgaaacaggaggatcaagagcacaaacgtgtgaagagatggtctgcggagcatccgcaccatgctaatgaaagcacgcacttatggattgctcgaaatgcgattcaaattatgagtcgtaatcaagataagacggttcaagaaaatgaattacaattcttaaaaatacctgaatataaggagttatttgaaagagggctttatgatgccgattatcttgatgagtttaacgatggaggtacaggtacaatcggtattgatgggctaattaaaggaggctggaaatctcatttctatgatcctgatacgaaaaagaactataaaggagaagaagaaccaacagccctttcgcaaggagataaatattttaaattagcaggagattattttaagaaagaagattggaaacaagctttctattatttaggtgttgcgacgcattacttcacagatgctactcagccaatgcatgctgctaattttacagctgtcgacacgagtgcaataaagtttcatagcgcttttgaaaattatgtaacgacagttcagacaccgtttgaagtgaaggatgataagggaacatataatttggtcaattctgatgatccgaagcagtggatacatgaaacagcgaaactcgcaaaagcagaaattatgaatattactagtgataatattaaatctcaatataataaaggaaacaaagatctttggcaacaggaagttatgccagctgtccagaggagtttagagaaagcgcaaagaaacacggcgggatttattcatttatggtttaaaacatatgttggcaaaactgcagctgaagatattgaaactacacaggtaaaagattctaatggagaagcaatacaagaacaaaaaaaatactacgttgtgcctagtgagtttttaaatagaggtttgacctttgaggtatatgcttcgaatgactacgcactattatctaatcacgtagatgataataaagttcatggtacacctgttcagtttgtttttgataaagagaataacggaattgttcatcggggagaaagtgtactgctgaaaatgacgcaatctaactatgatgattatgtatttcttaattactctaatatgacaaattggttacatcttgcgaaacgaaaaacaaatactgcacagtttaaagtgtatccaaatccggataactcatctgaatatttcctatatacagatggatacccggtaaattatcaagaaaatggtaatggaaagagctggattgagttaggaaagaaaacggataaaccgaaagcgtggaaatttcaacaggcggaataa

SEQ ID NO: 870 - protein, 473 aa, Unknown
  Obtained from environmental sample
  SIGNAL (1)...(20)
  DOMAIN (1)...(303): Zinc dependent phospholipase C
MKKKLCTWALVTAISSGVVAIPTVASACGMGEVMKQEDQEHKRVKRWSAEHPHHANESTHLWIARNAIQIMSRNQDKTVQENELQFLKIPEYKELFERGLYDADYLDEFNDGGTGTIGIDGLIKGGWKSHFYDPDTKKNYKGEEEPTALSQGDKYFKLAGDYFKKEDWKQAFYYLGVATHYFTDATQPMHAANFTAVDTSAIKFHSAFENYVTTVQTPFEVKDDKGTYNLVNSDDPKQWIHETAKLAKAEIMNITSDNIKSQYNKGNKDLWQQEVMPAVQRSLEKAQRNTAGFIHLWFKTYVGKTAAEDIETTQVKDSNGEAIQEQKKYYVVPSEFLNRGLTFEVYASNDYALLSNHVDDNKVHGTPVQFVFDKENNGIVHRGESVLLKMTQSNYDDYVFLNYSNMTNWLHLAKRKTNTAQFKVYPNPDNSSEYFLYTDGYPVNYQENGNGKSWIELGKKTDKPKAWKFQQAE

SEQ ID NO: 871 - DNA, 987 bp, Unknown
  Obtained from environmental sample
atgaacaataagaagtttattttgaagttattcatatgtagtatggtacttagcgcctttgtatttgctttcaatgataagaaaaccgttgcagctagctctattaatgagcttgaaaattggtctagatggatgaaacctataaatgatgacataccgttagcacgaatttcaattccaggaacacatgatagtggaacgttcaagttgcaaaatccgataaagcaagtgtggggaatgacgcaagaatatgattttcgttatcaaatggatcatggagctagaatttttgatataagagggcgtttaacagatgataatacgatagttcttcatcatgggccattatatctttatgtaacactgcacgaatttataaacgaagcgaaacaatttttaaaagataatccaagtgaaacgattattatgtctttaaaaaaagagtatgaggatatgaaaggggcggaaagctcatttagtagtacgtttgagaaaaattattttcgtgatccaatctttttaaaaacagaagggaatataaagcttggagatgctcgtgggaaaattatattactaaaacgatatagtggtagtaatgaatctgggggatataataatttctattggccagacaatgagacgtttacctcaactataaatcaaaatgtaaatgtcacagtacaagataaatataaagtgagttatgatgagaaagtaaacgctattaaagatacattaaatgaaacgattaacaatagtgaagatgttaatcatctatatattaattttataagcttgtcttctggtggtacagcatggaatagtccatattattatgcgtcctacataaatcctgaaattgcaaattatatgaagcaaaagaatcctacgagagtgggctggataatacaagattatataaatgaaaaatggtcaccattactttatcaagaagttataagagcgaataagtcacttgtaaaatag

SEQ ID NO: 872 - protein, 328 aa, Unknown
  Obtained from environmental sample
  SIGNAL (1)...(23)
  DOMAIN (56)...(195): Phosphatidylinositol-specific phospholipase C, X domain
MNNKKFILKLFICSMVLSAFVFAFNDKKTVAASSINELENWSRWMKPINDDIPLARISIPGTHDSGTFKLQNPIKQVWGMTQEYDFRYQMDHGARIFDIRGRLTDDNTIVLHHGPLYLYVTLHEFINEAKQFLKDNPSETIIMSLKKEYEDMKGAESSFSSTFEKNYFRDPIFLKTEGNIKLGDARGKIILLKRYSGSNESGGYNNFYWPDNETFTSTINQNVNVTVQDKYKVSYDEKVNAIKDTLNETINNSEDVNHLYINFISLSSGGTAWNSPYYYASYINPEIANYMKQKNPTRVGWIIQDYINEKWSPLLYQEVIRANKSLVK

SEQ ID NO: 873 - DNA, 1641 bp, Unknown
  Obtained from environmental sample
atgagaagactgttgctggggggagtgatcgctgcggcgatcgtggccgtggccccggggatgcaggcggcgctgccggatccggtcacgatcgacagcggtcgagtgtccggcaccgcgacgtcctcgcccgacgtccgcgccttccggggcattccgttcgcggcgcctccgctgggcgagaaccggtggcgggcgccggggccgccggcgacgtgggatggtgtgctcgaagctcatgccttcggtccgaattgcctggccggtgcgcccggcggcgggcgtggtcgcggcgcgccggctgccgcgcccgccgcggcggctccggcggcaccgggcgcacgcggcgccgcccccgcggcaccgggcggcggcccggggggagcgcccgcggccagtgaggactgcctccacatcaacgtctggaccggtgcgagcagtccctccgagcgccggccggtcatgatgtggatctacggcggcggcttcacgggcggctcgagctcgcaggggtggtacgacggcgaacagctcgcggccaagggcgccgtggtcgtcaccttcaactaccggctgggcgccttcggcttctttgcgcaccccgacctggcgcgcgagtcggggcgcaacgccgcaggcaactacgggatgatggacgccatcgcggcgctccagtggattcagcgcaacatcgccgccttcggcggcgacccgaccaacgtcacggtgttcggcgagtcggccggcgccatcatgacggcggcgctcgtcggctccccgcaggcaaagggcctgttccaccgcgccatcctgcagagcggcggctggatgggcctgcagatgaaccggatgacgaccggtgcgcaggcccaggccaacggcgtgaaggccctgcaggcgctcaatgcctcgtccgtcgccgagctgcgcacgcggccgctcgccgagctggcgggcctcaccggcagcgggctcgtcgtggacggctacctcgtgccggaagacctctcgatcaccttcgcccagggacgtcagaacccggtggacatcatgaccgggtcgaaccgggacgaggcgaccttcttcggcggaggccagcggacggtcgacgtgcaccaggcgcaggcgacgcagcggttcggcgacctcgcccccgagtacctgaagctctatcccgcctcgtccgacgcgcaggcggtgacctcctacaacgacgcctacgcccacgaaaccagctggcacatgcggctggccgcccaggcacaggcgcgggaggggaagcacgcgtacgtgtactacttcacgcgcgtcccgctcgacgccggcggacagccctcgccgcgcggggcgacgcatacggccgagatccgctacgccttcaacacccaggacggccaggtgtgggacgacaccgatcgccggctggccgacgcgatgtcgacctactgggtcaacttcgcgcgcacgggcaacccgaacggcaacagcctgccggactggcccgcgttccgcgacatggcgagcggccgggcactcgtgcttggcgaccgcatcgaggtggaagcgtcgccgttcacggcaccgctcgccttcttcgaccgcgcctaccagcggctgatgcagcagatccaggccgactga

SEQ ID NO: 874 - protein, 546 aa, Unknown
  Obtained from environmental sample
  SIGNAL (1)...(22)
  DOMAIN (1)...(532): Carboxylesterase
MRRLLLGGVIAAAIVAVAPGMQAALPDPVTIDSGRVSGTATSSPDVRAFRGIPFAAPPLGENRWRAPGPPATWDGVLEAHAFGPNCLAGAPGGGRGRGAPAAAPAAAAPAAPGARGAAPAAPGGGPGGAPAASEDCLHINVWTGASSPSERRPVMMWIYGGGFTGGSSSQGWYDGEQLAAKGAVVVTFNYRLGAFGFFAHPDLARESGRNAAGNYGMMDAIAALQWIQRNIAAFGGDPTNVTVFGESAGAIMTAALVGSPQAKGLFHRAILQSGGWMGLQMNRMTTGAQAQANGVKALQALNASSVAELRTRPLAELAGLTGSGLVVDGYLVPEDLSITFAQGRQNPVDIMTGSNRDEATFFGGGQRTVDVHQAQATQRFGDLAPEYLKLYPASSDAQAVTSYNDAYAHETSWHMRLAAQAQAREGKHAYVYYFTRVPLDAGGQPSPRGATHTAEIRYAFNTQDGQVWDDTDRRLADAMSTYWVNFARTGNPNGNSLPDWPAFRDMASGRALVLGDRIEVEASPFTAPLAFFDRAYQRLMQQIQAD

SEQ ID NO: 875 - DNA, 918 bp, Bacteria
atgcccctagatcctagaattaaaaagttactagaatcagctcttactataccaattggtaaagccccagtagaagaggtaagaaagatatttaggcaattagcgtcggcagctcccaaagtcgaagttggaaaagtagaagatataaaaataccaggcagtgaaaccgttataaacgctagagtgtattttccgaagagtagcggtccttatggtgttctagtgtatcttcatggaggcggttttgtaataggcgatgtggaatcttatgacccattatgtagagcaattacaaatgcgtgcaattgcgttgtagtatcagtggactataggttagctccagaatacaagtttccttctgcagttatcgattcatttgacgctactaattgggtttataacaatttagataaatttgatggaaagatgggagttgctattgcgggagatagtgctggaggaaatttggcagcggttgtagctcttctttcaaagggtaaaattaatttgaagtatcaaatactggtttacccagcggtaagtttagataacgtttcaagatccatgatagagtactctgatgggttcttccttaccagagagcatatagagtggttcggctctcaatacttacgaagccctgcagatttgctagactttaggttctctccaattctggcgcaagatttcaacggattacctccagccttgataataacagcagaatacgatccactaagggatcaaggagaagcgtatgcaaataaaatactacaagctggagtctcagttactagtgtgagatttaacaacgttatacacggattcctctcattctttccgttgatggagcaaggaagagatgctataggtctgatagggtctgtgttaagacgagtattttatgataaaatttaa

SEQ ID NO: 876 - protein, 305 aa, Bacteria
MPLDPRIKKLLESALTIPIGKAPVEEVRKIFRQLASAAPKVEVGKVEDIKIPGSETVINARVYFPKSSGPYGVLVYLHGGGFVIGDVESYDPLCRAITNACNCVVVSVDYRLAPEYKFPSAVIDSFDATNWVYNNLDKFDGKMGVAIAGDSAGGNLAAVVALLSKGKINLKYQILVYPAVSLDNVSRSMIEYSDGFFLTREHIEWFGSQYLRSPADLLDFRFSPILAQDFNGLPPALIITAEYDPLRDQGEAYANKILQAGVSVTSVRFNNVIHGFLSFFPLMEQGRDAIGLIGSVLRRVFYDKI

SEQ ID NO: 877 - DNA, 828 bp, Unknown
  Obtained from environmental sample
atgagaaaagaaaaaccggaatatggcattgtgctgagtggtggaggcgcccgcggaattgcccacattggtgtgctagctgcactggaaaagcacgggatcagtccgggtgtcgtttccggctctagcatgggcgccatcgtaggcgcattatacgccgggggggtgagcactgaagaaatgcttgaaatcgcccggaaccggaagcttaacgacctcttcgaatggtcgttcaaaaagcatggcggtatgctttcattaaagatgctcatgcaggttcttgaaacacatatccctgaaaattctttcgaatcgttaaagaaaaagttattcattaccgtatccaatatttcatccggccaggaggaggtcatttcagaaggtaagttgtaccaggcagtggtagcatcggcttctatcccgatcatttttgagcctcagctgatcaatggccagacttatgtcgatggcggcctgttcaacgatctgccggttgatccactgataggaaagtgcaggagtatcatcgcttcacatgtgaactacaatggtccgaatcctgatctgaccagtattcgcgccatcgcagaacgggtttaccgcctggctatttatcaacatgtacataagaatttcagcaaatgtgattatattattgacccgcccgcgttgagggatcatagcatttttgatttcaagcatatcgaccggttgtttgagatcgggtttgaagcggctgagatccttattacccagatgcaggaaccatcagttgaaaaaccgcttataatccgggaaattaagtccactaaaaagagattaaaatga

SEQ ID NO: 878 - protein, 275 aa, Unknown
  Obtained from environmental sample
  DOMAIN (10)...(169): Patatin-like phospholipase
MRKEKPEYGIVLSGGGARGIAHIGVLAALEKHGISPGVVSGSSMGAIVGALYAGGVSTEEMLEIARNRKLNDLFEWSFKKHGGMLSLKMLMQVLETHIPENSFESLKKKLFITVSNISSGQEEVISEGKLYQAVVASASIPIIFEPQLINGQTYVDGGLFNDLPVDPLIGKCRSIIASHVNYNGPNPDLTSIRAIAERVYRLAIYQHVHKNFSKCDYIIDPPALRDHSIFDFKHIDRLFEIGFEAAEILITQMQEPSVEKPLIIREIKSTKKRLK

SEQ ID NO: 879 - DNA, 939 bp, Unknown
  Obtained from environmental sample
atgaccctgccggtcggcgccctgctcgcggtggcggcgccggccagcgtagccgacgcggagatcgacgcctttgtcgccgccttcgtcgcgcccgaggcggcgccggaagacgcggcggaggcggaaagcgccttcgcaccgcgcgacatcgaggccggcggccggcggctgcgcgtgctcgatctcggcggcgaggccggccgcgggggaccgccgctcgtgctggtgcacgggttcggcgccgacctcaacgcgtggatgttcaaccagccggcactggccgccagccggcgcacggtcgcgctcgaactgccgggccacggcggttccgacaaacaggtcggcgccggcgacgccgcaatgttcgccgatgcggtggccgatacgctcgccgccctcggcatcgagcgcgttcatctcgtcggtcattcgatgggcggcgggatcgcgctctttctggcgcagcagcggccacagcttgccgcctcgctgaccctgatcgcctcggccgggctcggccccgagatcaacggcgcctttatcgacggctttgtaaaggttcagcggcgccgcgaggcgcaggacctgctcgcggtgctggtgcatgatccgtcgctgatcagccgcgcgatgatcgaggaaacgctgcgctacaagcggctcgacggggtcggggcggcgctcgatgcgatcgcgcgcgcctggttcgccgatggacgccagaggctcgatttgcggccggcgctcgccgcgctgccgatgccggtgcagctgatctgggggcgcgacgaccgcatcatcccgctcgcccatgccgaagcgctggccggccagctgccggtccatattctcgatgaggtcggccatctgccgcagatggagaaggcgggcgacgtcaatcggctgatcgcccgctttgtcgcagcgcatccgtag

SEQ ID NO: 880 - protein, 312 aa, Unknown
  Obtained from environmental sample
  DOMAIN (98)...(306): alpha/beta hydrolase fold
MTLPVGALLAVAAPASVADAEIDAFVAAFVAPEAAPEDAAEAESAFAPRDIEAGGRRLRVLDLGGEAGRGGPPLVLVHGFGADLNAWMFNQPALAASRRTVALELPGHGGSDKQVGAGDAAMFADAVADTLAALGIERVHLVGHSMGGGIALFLAQQRPQLAASLTLIASAGLGPEINGAFIDGFVKVQRRREAQDLLAVLVHDPSLISRAMIEETLRYKRLDGVGAALDAIARAWFADGRQRLDLRPALAALPMPVQLIWGRDDRIIPLAHAEALAGQLPVHILDEVGHLPQMEKAGDVNRLIARFVAAHP

SEQ ID NO: 881 - DNA, 963 bp, Unknown
  Obtained from environmental sample
gtgattactttgataaaaaaatgtttattagtattgacgatgactctattatcaggggttttcgtaccactgcagccatcatatgctactgaaaattatccaaatgattttaaactgttgcaacataatgtatttttattgcctgaatcagtttcttattggggtcaggacgaacgtgcagattatatgagtaatgcagattactttaagggacatgatactctgcttttaaatgagctttttgacaatggaaattcgaacgtgctgctaatgaacttatccaaggaatatacatatcaaacgccagtgcttggccgttcgatgagtggatgggatgaaactagaggaagctattctaattttgtacccgaagatggtggtgtagcaattatcagtaaatggccaatcgtggagaaaatacagcatgtttacgcgaatggttgcggtgcagactattatgcaaataaaggatttgtttatgcaaaagtacaaaaaggggataaattctatcatcttatcagcactcatgctcaagccgaagataccgggtgtgatcagggtgaaggagcagaaattcgtcattcacagtttcaagaaatcaacgactttattaaaaataaaaacattccgaaagatgaagtggtatttattggtggtgactttaatgtgatgaagagtgacacaacagagtacaatagcatgttatcaacattaaatgtcaatgcgcctaccgaatatttagggcataactctacttgggacccagaaacgaacagcattacaggttacaattaccctgattatgcgccacagcatttagattatatttttgtggaaaaagatcataaacaaccaagttcatgggtaaatgaaacgattactccgaagtctccaacttggaaggcaatctatgagtataatgattattccgatcactatcctgttaaagcatacgtaaaataa

SEQ ID NO: 882 - protein, 320 aa, Unknown
  Obtained from environmental sample
  SIGNAL (1)...(29)
  DOMAIN (37)...(319): Endonuclease/Exonuclease/phosphatase family
MITLIKKCLLVLTMTLLSGVFVPLQPSYATENYPNDFKLLQHNVFLLPESVSYWGQDERADYMSNADYFKGHDTLLLNELFDNGNSNVLLMNLSKEYTYQTPVLGRSMSGWDETRGSYSNFVPEDGGVAIISKWPIVEKIQHVYANGCGADYYANKGFVYAKVQKGDKFYHLISTHAQAEDTGCDQGEGAEIRHSQFQEINDFIKNKNIPKDEVVFIGGDFNVMKSDTTEYNSMLSTLNVNAPTEYLGHNSTWDPETNSITGYNYPDYAPQHLDYIFVEKDHKQPSSWVNETITPKSPTWKAIYEYNDYSDHYPVKAYVK

SEQ ID NO: 883 - DNA, 918 bp, Unknown
  Obtained from environmental sample
atgcaggctcaacaccttgcgggcaacggccgtccgaccgatgcacagtggctgctggcagaccccgatcaccagatgccattgccctttccccaggccgaggcctatgcgcgccaggtcatggccctggcccgggaactgccgaccgacggactcgacgtgcgccttggcgtcccctacggccggcacccgctgcaccgctacgacgttttcggtccgaaaaatgcccaggacgcaccagttctggtcttctggcatggcggtggctggaccaacggctaccgcggctacgtcagcttcatggcgccgctggtggcggagctgggctgcatcctgatcgccccctcctaccggcttgcgccacgggacaggctgcctgcggcctacgaagacgggcttgccgcgctgcgccatgtgttcgacaacgcaccgtccttcggcggctgcgtccatcgcctccacctcgctgggcactccgccggcggccatcttgcggccctggtcgccctgcggcatgccgacatccggcaggcaggcatcccggctggcgccatccgtgcctgcctgcccatcagcggcatcatggacctgcaccatccggccccagaggaaggcagcctggagcagcgtgtctacaccatggtgctgagcgagcccggcgacgatgtggtcatgagcccggtccactggagcatgggcagcaccgttcccatgcacctgagctacggcgagcgggacagcgaacgcgtgcagcgctccaaccaggagcttgcgcacaggctgtcgcaagccggcacgccatgctcgctttccgttgaagcaggcctggaccacttctccacccataccaccttgcgcgcaccccaggcctcctggtaccagcgcctggcacgcatcctggaggcatccgcaccatga

SEQ ID NO: 884 - protein, 305 aa, Unknown
  Obtained from environmental sample
MQAQHLAGNGRPTDAQWLLADPDHQMPLPFPQAEAYARQVMALARELPTDGLDVRLGVPYGRHPLHRYDVFGPKNAQDAPVLVFWHGGGWTNGYRGYVSFMAPLVAELGCILIAPSYRLAPRDRLPAAYEDGLAALRHVFDNAPSFGGCVHRLHLAGHSAGGHLAALVALRHADIRQAGIPAGAIRACLPISGIMDLHHPAPEEGSLEQRVYTMVLSEPGDDVVMSPVHWSMGSTVPMHLSYGERDSERVQRSNQELAHRLSQAGTPCSLSVEAGLDHFSTHTTLRAPQASWYQRLARILEASAP

SEQ ID NO: 885 - DNA, 606 bp, Unknown
  Obtained from environmental sample
atgcgaatgtggttgttgagtgccggcctggccttgatgtgcatgacccagggggcagccgcaggtactgtactggtcgtcggcgatagtatcagtgccgctttcggcctggatacccgccagggctgggtcgccttgctggaacagcgcctgaaaagcgagggtttcgacgccagggtggtcaacgcctcgatcagcggcgacaccagtgccggaggccaggcgcggctgccggcgctgcttgcagagcacaagccggagctggtggtgctggagctgggaggcaatgacggcctgcgtgggcagccgccaaagcaattgcaacaaaatcttgcctcgatgatcgaccgctcccgtgaggccggggccaaggtgctgttgctgggcatgcgcttgccgcccaactacggcaagcgttacaccgacgccttcgcaaaggtctatgccgacctgcaggccgagaaacaggtggcgctggtgccgtttttcctcgaaggggtagggggtgtgcccgagctgatgcaggccgatggcattcatccgggggcgggcgcccagcaaaggttgctggaaaatgcctggccgcaactaaaaccgctgctttga

SEQ ID NO: 886 - protein, 201 aa, Unknown
  Obtained from environmental sample
  SIGNAL (1)...(21)
  DOMAIN (24)...(193): GDSL-like Lipase/Acylhydrolase
MRMWLLSAGLALMCMTQGAAAGTVLVVGDSISAAFGLDTRQGWVALLEQRLKSEGFDARVVNASISGDTSAGGQARLPALLAEHKPELVVLELGGNDGLRGQPPKQLQQNLASMIDRSREAGAKVLLLGMRLPPNYGKRYTDAFAKVYADLQAEKQVALVPFFLEGVGGVPELMQADGIHPGAGAQQRLLENAWPQLKPLL

SEQ ID NO: 887 - DNA, 726 bp, Unknown
  Obtained from environmental sample
atgctcgcgctgatccggaaggagtggcgcctgaaccgggcgatcgtcatcgggtgcctggtcacgatggtgatgccgtacgtcatcaacgtcgccaatacgtggatcaacccgtctcgcggcgcaaacctcgagccgcgcgattacgtggacgcggtgaagttcgcagcgtacgcgtgcctggcgatcacggtcgccttcgccgccgcgttcggcggactcgcgttcgccggcgagcggcgcgagcggacggcggagttcatggcgatgttgccggtctcgcgcgacgcgatcatcgcgagcaagctcgtcgtgcccgccgcctgcctcgcgacgttgatcggcgtgcacgtgctcgtgctgctcgcgtgcggcgagtgggccgtccgcatcggcctgcggcggcaggacgcgcaggacgccttgtacgcggcgatgttcgccgtcgcctacgccgtcgccgtcttcggcatcgcctgggcgctgtcggtgttcctgcgtagcgcggcgatcgccggcaccatcacgattgccatcggcgtggggatgctcttcgggatgatggcctggggcgaccgggtgcaccggttccttcacgagcggaactacgtccggtccgacagcgaattcgggacgatcttcatcatctgcgggacggtcgggctgatcgggctcgtcgcgatcgccgcctcgagccttcactaccgccggcgcgtcgcgccgtag

SEQ ID NO: 888 - protein, 241 aa, Unknown
  Obtained from environmental sample
MLALIRKEWRLNRAIVIGCLVTMVMPYVINVANTWINPSRGANLEPRDYVDAVKFAAYACLAITVAFAAAFGGLAFAGERRERTAEFMAMLPVSRDAIIASKLVVPAACLATLIGVHVLVLLACGEWAVRIGLRRQDAQDALYAAMFAVAYAVAVFGIAWALSVFLRSAAIAGTITIAIGVGMLFGMMAWGDRVHRFLHERNYVRSDSEFGTIFIICGTVGLIGLVAIAASSLHYRRRVAP

SEQ ID NO: 889 - DNA, 1581 bp, Unknown
  Obtained from environmental sample
atgaacgctgcgcaactgctttccgcgataacgggttccgtcacggtgttggctttactcgcacaggcacccgcgcgagcgcaggtgcaaacgcctgcgccaacgcagcaggcaacctgcagcgcgctcgccgagtgggccggcggtccgggcgacttgcgaattgtcgaagcgcgcttctataccgaacgcagtgtcggcggtcccggcggcggccagacgctaccgccgcattgccacgtcaccggcagcttcgagcatcgcaccggcatcggtgacgtcgagtatgcgatcggtttcgcaatcaacctgcccgaagactggaacggccgctttctgtttcagggcggcggagggctgaatggcgtggtcagagaaccggtcggcgccggggctagcggcggccgctccgcgctcgcgcgcgggttcgcagtcgtcagcacggacagcgggcacaccggttccggcttcgacagcagcttcatggccgaccaactcgcgctgctgaacttccagtttctggcaaacgcgaagaccaccgaggtggcgcgcccgatcgtcgaggcctattacggctcggcgcctcatcacagctatttcgtcggctgctccaccggcgggcgcgaaggcatgatcatggcgcagcgctatcctcaccttttcgacggcatcgtctccggtgcgccggcgatgcgaacgacgatcagcaatctggcattgcgctggatcagcaaccagtacgtcagggccggcgtatcaaatccgcgcgagccgttcgccgccgaagagcgggccctgatcatgggcgcgctgatggattcatgtgatgcactggacggccttgaggatagcctgatcttcaatcgcacgtcctgcgacttcgacccgcgcgcgctcgcgtgctccgcgaatcccggcagaacccccgggcaacagtgcctggtcgatgccaaggccgaagctctggcgcgcgccatggcaggcccggtcaatgcagccggcatgccggtctacgtctcgtttccttacgactcgggcatcgacgataccgggggtctgccggggctcctgatcgcgggcggcagcccgccggtcggcgggagcggcgcagacatgtccagccaggacgtcgacgcggaattcatggctgcactcgtggcaaatgaggcgctcggcgccaccgcctggcagttcaacgtgagcacgttcattgaggcagggggcaagcagatgttctatcacggcgaggccgacccgtggttttccgcgaacgacaccgtgcgttacttcgatgcaatgagtgccgccaacaatgacgtcgcagccgttgatcaatacagtcgcctgtacctcgtgcccggcatggcccactgcgccggaggcgagcagaccgtcgactcattcgatctgctgacaccgatcgtcgagtgggtcgagaacggcaacgccccgggtgccgtgacagccaccggcgcctcgatgcccggccaaagccggccactgtgcccgtacccgagctacgcgcacttcgagggcggcgaggcagcgaacgtcggcgattacgcgtgccgcatgccgtag

SEQ ID NO: 890 - protein, 526 aa, Unknown
  Obtained from environmental sample
  SIGNAL (1)...(27)
MNAAQLLSAITGSVTVLALLAQAPARAQVQTPAPTQQATCSALAEWAGGPGDLRIVEARFYTERSVGGPGGGQTLPPHCHVTGSFEHRTGIGDVEYAIGFAINLPEDWNGRFLFQGGGGLNGVVREPVGAGASGGRSALARGFAVVSTDSGHTGSGFDSSFMADQLALLNFQFLANAKTTEVARPIVEAYYGSAPHHSYFVGCSTGGREGMIMAQRYPHLFDGIVSGAPAMRTTISNLALRWISNQYVRAGVSNPREPFAAEERALIMGALMDSCDALDGLEDSLIFNRTSCDFDPRALACSANPGRTPGQQCLVDAKAEALARAMAGPVNAAGMPVYVSFPYDSGIDDTGGLPGLLIAGGSPPVGGSGADMSSQDVDAEFMAALVANEALGATAWQFNVSTFIEAGGKQMFYHGEADPWFSANDTVRYFDAMSAANNDVAAVDQYSRLYLVPGMAHCAGGEQTVDSFDLLTPIVEWVENGNAPGAVTATGASMPGQSRPLCPYPSYAHFEGGEAANVGDYACRMP

SEQ ID NO: 891 - DNA, 756 bp, Unknown
  Obtained from environmental sample
atgttcaaaacagcaacgctactcgcaagattagcatacaagtcagataacagaataaaacaagagattgaggctaacaacctctctcttgttacaataaaagaagttgataacacagcaagttttctaaacgacccaagacagaaggatttaaagttctacatagcagatgacaatgaagaaggtataaggtacttcgtcatacgcggctctgtgggattattagagaattgggtacacaacctagcattctggaaaaatacagacgatatacattggggatttagcaaagaggctgagtcattattacctcatatggagcagtacgtaaatctaggatataaacagataactataggtcattctaaaggagctgccttaggtcatatattagctccagacttaaaagcagatatttcaataggcataggaagtccgttctttgctggacgtaaatacatagaaagtttaaaaaataaatggaatacaacttactacgacattgttcaccacctagatatagtttcacttttaactagaaaaatattccaacctctaggaactgtgttgtatattgatcgtaaaaataatctagtagaaaatccaaccagaatgaaaagaattagaaacaccacactgtcgtttatacttaagagatacagagatggaagaacgttacacgatattcttcactaccactgctataaaaggtacgaagatttctttaagatagatcaccgaaaagctaaaaagtga

SEQ ID NO: 892 - protein, 251 aa, Unknown
  Obtained from environmental sample
  DOMAIN (63)...(183): Lipase (class 3)
MFKTATLLARLAYKSDNRIKQEIEANNLSLVTIKEVDNTASFLNDPRQKDLKFYIADDNEEGIRYFVIRGSVGLLENWVHNLAFWKNTDDIHWGFSKEAESLLPHMEQYVNLGYKQITIGHSKGAALGHILAPDLKADISIGIGSPFFAGRKYIESLKNKWNTTYYDIVHHLDIVSLLTRKIFQPLGTVLYIDRKNNLVENPTRMKRIRNTTLSFILKRYRDGRTLHDILHYHCYKRYEDFFKIDHRKAKK

SEQ ID NO: 893 - DNA, 1083 bp, Unknown
  Obtained from environmental sample
atgacatcgaagcaatccatcaactcctccctgatcctggggggcggcatcggtctcggcgcctttcaggtgggcgccttcgaggttctgcaagcggccggaataaatatccgctcagtctcgggggcatccatcggagcgatcaatggcgcgattatcgtcggcaatgcgcccgaagatcgagcggccaagcttcgagggttctgggacgtgatttcagtggaagcgctgccgacggcgtggcttgacccttggggggtcggcagcaggggccggtcgcggcgtctgcggaactgggtgaactcgcttgccaccggggtcacgggaagcccaggcctcttcctcccgcgcctggcttcaggtggccgcgggcacgcgcgtagtctctacgataacagcgtggccgcgcgtactttatcctccttcgtcgatttcgaccgcctcaatgacggcagcgttcggttctgccttgcgaccaccgacgtcgaggccggagaggccgcgttcttcgacactgcgaagggcgatcgcatcgagctcgatcacctgctcgccagcagctcgctgctccccgctttcgaacccgtccgtatcggcaagcggctgctggccgacggaggccttgcggttaatgttcctcttgaagcggaaatcggccctgcacgagggagctgcgccgagccgctgtgctttgtcctcgacctctacacgccaggaggcggccagcctttgccgctcaatcgcgtggtggaaagctcactggacctgatcttcggaatgcagacgcggatgcggctggcagggctggcgcgggagtgggagctgagatcaaagctccgagcggcaacagcttccccggaagccgatggcggctatgcgtgcggcggcgtggaccttttctacatgagctatcgcggagcggaagaagacgccggtttcggaaagccctttgacttgtcccctgcaaccctgaccgaaaggatcgaggaaggacggagggcagcggaccgcgcgctggcgcttcgaaacacgctgcctgccgagacccatgccgatcttagagttcatagggtcgcccactga

SEQ ID NO: 894 - protein, 360 aa, Unknown
  Obtained from environmental sample
  SIGNAL (1)...(26)
  DOMAIN (11)...(218): Patatin-like phospholipase
MTSKQSINSSLILGGGIGLGAFQVGAFEVLQAAGINIRSVSGASIGAINGAIIVGNAPEDRAAKLRGFWDVISVEALPTAWLDPWGVGSRGRSRRLRNWVNSLATGVTGSPGLFLPRLASGGRGHARSLYDNSVAARTLSSFVDFDRLNDGSVRFCLATTDVEAGEAAFFDTAKGDRIELDHLLASSSLLPAFEPVRIGKRLLADGGLAVNVPLEAEIGPARGSCAEPLCFVLDLYTPGGGQPLPLNRVVESSLDLIFGMQTRMRLAGLAREWELRSKLRAATASPEADGGYACGGVDLFYMSYRGAEEDAGFGKPFDLSPATLTERIEEGRRAADRALALRNTLPAETHADLRVHRVAH

SEQ ID NO: 895 - DNA, 1533 bp, Unknown
  Obtained from environmental sample
atggcacacaaaattgaacctccgttctatccgatcgtgtacgtccgcggttacgccatgacggcgaacgaacgcgaagaaacatttaacgacacctactacggattcgccgccacctccgtggagaaacgggacgtgccgccgccggattattttcgcgcggacatgttcgagggacagttgatccgtttcatgaagatgcgcgagcacgcctattacgacgcgacgaatcgtggtttggaagattgtccggacaatcccgtgcgcagtctctgggtctgccgcttctacgaccaggacgttttcaaggacaagctgcgcagcattgaagatcacgcggaggaacttcgcgcgctcgtctgcgaaaccattcctgcccgcctcaaagcctgcaaggttgacctgggggcgaacctgaagaattacaaggtcattctcatcgcgcattccatgggcggtctggtctgccggacgttgattcagaatctgctgccccggcggaaggaaaatcccaaggactgggtgcatcgcttcatcaccattggcacgccccacaagggaatcgagctggggcgcatcccggatttcatggagcgatttgtcctgcgaacggcaaatccgttcgacgccaatatcttcgacgaaaagcggatgcggcaatacttgaaattgccttccgattacgagccgcacagcctcggacccagcgacgccccctacgcgtttcccgtaaaacgctgtctctgtctgatcggcagcgattacgaatcctatggtgccgcgcaacacctgaccggaagcttcagcgatgggctggtgaaacaggatcgggcttatgtcgtggccggcaaaccggacgccaaaggcaaatatgcgtcggaacaaaaatcctactgggccaacgtgcaccgcgctcattccggacggcggggaattgtaaacagctatgaaagtttcgaaaatgttcaccggtttattttcggcgatgtcagagccgagatttacctggagaacgttcagctcggagggacgccagtcgaaaatgccgattacttctacgacattgaatttgcgctctcgattcgcggcacgccggtttacctgcatcgccggcagcagactccctgtgaaaacgccatccgttactcgcgcagcgagcttcaggaaaagacggtccggctgcacacgcttttcctgaactcgggtttgaagctcaatccggatccgccttattcgcatttcaaattggaattccgggtccgcgaacatgcgatcaagaagggattgttttgggaccgggagtatccggagaagaccatttactcggaagatctcgaggtgcggattggcgattttgacgagaagcttcccggaaaagaggttcagtttcggtggctttcagagagtggcgactggcaggacgcactacacgatgcgaacgaattcagaatcaccttgcgcgccgccggttcgatgaccggaaactttctgattcgggccagcgcgtggccggatgccgccgtggctgattag

SEQ ID NO: 896 - protein, 510 aa, Unknown
  Obtained from environmental sample
MAHKIEPPFYPIVYVRGYAMTANEREETFNDTYYGFAATSVEKRDVPPPDYFRADMFEGQLIRFMKMREHAYYDATNRGLEDCPDNPVRSLWVCRFYDQDVFKDKLRSIEDHAEELRALVCETIPARLKACKVDLGANLKNYKVILIAHSMGGLVCRTLIQNLLPRRKENPKDWVHRFITIGTPHKGIELGRIPDFMERFVLRTANPFDANIFDEKRMRQYLKLPSDYEPHSLGPSDAPYAFPVKRCLCLIGSDYESYGAAQHLTGSFSDGLVKQDRAYVVAGKPDAKGKYASEQKSYWANVHRAHSGRRGIVNSYESFENVHRFIFGDVRAEIYLENVQLGGTPVENADYFYDIEFALSIRGTPVYLHRRQQTPCENAIRYSRSELQEKTVRLHTLFLNSGLKLNPDPPYSHFKLEFRVREHAIKKGLFWDREYPEKTIYSEDLEVRIGDFDEKLPGKEVQFRWLSESGDWQDALHDANEFRITLRAAGSMTGNFLIRASAWPDAAVAD

SEQ ID NO: 897 - DNA, 1506 bp, Unknown
  Obtained from environmental sample
atggaaaatccctccgcccctgtggttgaaacgcgccagggcgcactgattggttttactgaaggcgatacccacgtgtggtgcggcattccctatgcagcaccgcccgtaggccagtggcgctggcgctccccgcgtcctcccgcgcgctgggatggcgtacgtccggcgacggcgttctccgcctccagctggcagagcagcgaaagctgtcaggagctgggtggcggcgatcccggccagttctctgaagactgcctgtaccttaacgtctggtcgccagtcgcacgcgccgatccgcttccggtgatggtctggctgcacggcggaggatttaccctcggcgctggcgggctgcctccgtataacggcagggcgctggcgaagcgcggcacggtggtggtgacgatcaattaccgtctcggacacctcggcttttttgcccatccggcgctggagggggaagaagagcgcgtggtgcataactttgcgctgctcgatcagatccaggccctggaatgggtgcgcgataacatcgccgcgttcggcggcgatcctgagaacatcaccgtatttggcgagtcggccggcgcgcgcagcgtgctgtcgctgatggcctctccgcttgcgcgaggactgttccataaagccattgtgcaaagcgggtacacgctgccggacacgccacgcgagcaggccatgcataaaggcgaagcgattgccgcccatttcggcctgcaaaatgccaccgctgaacagcttcgcgcgatcccgcctgaggcgttctggccgctgacctcgccgctgaatatcgcccctgcgcccatcgtgggggattgcgttttgcctgaggccatgctcgacgttttcttcgcggcccgccagcatcctgtaccggtgatgattgggtcaaacagcgacgaagccagcgtgatgtcggtgttcggggtcgatctggccgggcagatccagaagcttcgccgcgagcggcgctttggcctggggctgattaagctgctttatcctggcgtgaagggcgatgaggaacttggcaggcaggtatgccgcgacatggccttcaccactatgggatacgtggtgatgcaggcgcagcagcgggcgggcggcctgtgctggcgatactggtttgattatgtggccgaagcggagcacgcgacgtacatcaacggcgcctggcacggcaacgaagtgccctacgtgttcgatacccttggacaggtggaaccctcgcggcagtatgtaaatgaacgcgatctggccttcgccgctcaggtggcggactactgggtgagcttcgcccgggatgcgggggcacgcgatagtctggcagggcccacgcgctggcccgcctgccggaaagggcgagacgtgctgttaagtatcggtgtgaataaacatgcaggttttcggcttgaaaaccgcttcatgcgtgcccgaatgagcctcttcaaacgggtgatgaaacaccacgtcagcctcgactga

SEQ ID NO: 898 - protein, 501 aa, Unknown
  Obtained from environmental sample
  DOMAIN (1)...(481): Carboxylesterase
MENPSAPVVETRQGALIGFTEGDTHVWCGIPYAAPPVGQWRWRSPRPPARWDGVRPATAFSASSWQSSESCQELGGGDPGQFSEDCLYLNVWSPVARADPLPVMVWLHGGGFTLGAGGLPPYNGRALAKRGTVVVTINYRLGHLGFFAHPALEGEEERVVHNFALLDQIQALEWVRDNIAAFGGDPENITVFGESAGARSVLSLMASPLARGLFHKAIVQSGYTLPDTPREQAMHKGEAIAAHFGLQNATAEQLRAIPPEAFWPLTSPLNIAPAPIVGDCVLPEAMLDVFFAARQHPVPVMIGSNSDEASVMSVFGVDLAGQIQKLRRERRFGLGLIKLLYPGVKGDEELGRQVCRDMAFTTMGYVVMQAQQRAGGLCWRYWFDYVAEAEHATYINGAWHGNEVPYVFDTLGQVEPSRQYVNERDLAFAAQVADYWVSFARDAGARDSLAGPTRWPACRKGRDVLLSIGVNKHAGFRLENRFMRARMSLFKRVMKHHVSLD

SEQ ID NO: 899 - DNA, 936 bp, Unknown
  Obtained from environmental sample
gtgccggtcgacccgcacatcgcagcgatgctcaccatgatggaacaggcgggcctgccgcccatgtacgaggggagccccgaggcggggcgcgccctgtacctgcagctcacccacggcgcccggaccccggagcagctcgtccccgtggcgggcaccgaggaccgcaccgtccccggcggccagggggagctccgggcgcgggtctaccggcccgagggcgaggggcccttcccgaccgtcgtcttcttccacggcggcggctgggtgatcggcgacctggacacccacgacaacatggcccgcaacgtctgccgcggcagccgcgcggtcgttgtcgcggtggactaccggctggcgcccgagcacccgttccccgctgcggccgaggacgcggtggccgcggcccgctgggtggcccagcacctggacgagctgggcggggacgaccggctcgcggtcgccggggacagcgccggcggcaacctcgccgcggtggtggcccagcagctcaccgccgacggcaccccgctgaccgggcagttcctcatctaccccgccgtcgacgccgagggcgagtacccctcccgcgtggagaacgcgaagggttacttcctcgagaaggacaccatggactggttctacggccactacgccggcgcctgggaggacgcgaaggacgcccggttgtccccgctgcacggcgccgacctctccggcctgccgccggcggtcatcgccaccgccgagtacgacccgctgcgcgacgagggcgaggcctacggcgaggcgctggaggccgccggggtccatgccgacgtgcggcgctacgacggcctgatccacggcttcttcgacatggggacgatctcgcccgccgcccaggccgccatcgacgagagctgcgcgcgcttcggcgccctcatccggaagtga

SEQ ID NO: 900 - protein, 311 aa, Unknown
  Obtained from environmental sample
MPVDPHIAAMLTMMEQAGLPPMYEGSPEAGRALYLQLTHGARTPEQLVPVAGTEDRTVPGGQGELRARVYRPEGEGPFPTVVFFHGGGWVIGDLDTHDNMARNVCRGSRAVVVAVDYRLAPEHPFPAAAEDAVAAARWVAQHLDELGGDDRLAVAGDSAGGNLAAVVAQQLTADGTPLTGQFLIYPAVDAEGEYPSRVENAKGYFLEKDTMDWFYGHYAGAWEDAKDARLSPLHGADLSGLPPAVIATAEYDPLRDEGEAYGEALEAAGVHADVRRYDGLIHGFFDMGTISPAAQAAIDESCARFGALIRK

SEQ ID NO: 901 - DNA, 1020 bp, Unknown
  Obtained from environmental sample
atgactgaggccacgcaggctgtgcccgaaggcaaaggcgtgccgatcccgcacgctgatctgggggctcgaggagtgctcgacccccaggtggctgaagttctgcgcctgcatgccaaggcgggacaagccccgtacgagaccatcggagccaatgccgcgcgcaaggcttttgacaaggccagccgtgtgctcgagattggctcacgccccgtgcatcggattgatcatgtcgagattcccgggcgtgccgggccggtgcatggccggctgatctggccccatgaaccgagctgggtcgatcgacttcctgtgctgctgctgttgcacggcggcggtttcacggtgggctcttccgcgaccatcgaacacattgcgcgcatgctcgccatggaggtgcattgcgccatactggcgctggactaccgtctggcgcccgagcaccggtttccagccgccttcgaggatgcctgggatgcgctggtctggctgcatgaggaagcgggcgcactggggctcgacgcttcgcgcattgccgttggaggcgactcggccggggggaccctggcggccgcctgtgcattgcaggcccgcgacgcaggcttgccattgcgtctgcagtggctggtctacccggggaccggcgcgcaccaggacaccgcctctcacctgcgtctggctgaaggctacctcatcacacgcaagaccattctctggttctttgagcaatacctcgcccacccggcacaacgtgaagactggcgcttcgcccccttgctcgcaactgacctccgcggcctggcgccggcctggatagcggtggccgaattcgatccgctggtcgatgaaggcgtggcatatgcacggcgcatgcaacagtcgggggtggaagtccacctcgatttctatccgggcatggtgcatgcgttcttcaacatggggggctatgtcaccatggccaggcgcgcacatgcccagggtgtggcagcattgcgcgcagcattcacgattcagggctga

SEQ ID NO: 902 - protein, 339 aa, Unknown
  Obtained from environmental sample
MTEATQAVPEGKGVPIPHADLGARGVLDPQVAEVLRLHAKAGQAPYETIGANAARKAFDKASRVLEIGSRPVHRIDHVEIPGRAGPVHGRLIWPHEPSWVDRLPVLLLLHGGGFTVGSSATIEHIARMLAMEVHCAILALDYRLAPEHRFPAAFEDAWDALVWLHEEAGALGLDASRIAVGGDSAGGTLAAACALQARDAGLPLRLQWLVYPGTGAHQDTASHLRLAEGYLITRKTILWFFEQYLAHPAQREDWRFAPLLATDLRGLAPAWIAVAEFDPLVDEGVAYARRMQQSGVEVHLDFYPGMVHAFFNMGGYVTMARRAHAQGVAALRAAFTIQG

SEQ ID NO: 903 - DNA, 744 bp, Unknown
  Obtained from environmental sample
ttgaaaatcaaaaaacctgaaccctttacatttgaagcaggtccccgtgcagtattgttattacatggctttacgggacatactgctgatgttcgtatgttaggtcgttttttagagaaaaagggatatactagccatgcacccatttatcgtggacatggagaagagccggaatcactaatcaaaacaacaccagaagattggtggaatgatgcattatcggcatataatcatttaaaggatctaggatataaagaaatagcaattgccggactgtcattagggggagcatttgctcttaagttagcaagtaataatcaggtaaagggtgtcattccaatgtgttctcctatgtattttgataatacggaacaattaacacaaggatttcgtacctttgcgaaacaatataaacagtttgaaaaaaagaacacagaacaaattgatactgaaataaatgaattgatggagaattctgtaccaatgttcgatcatattcgtacgttctttcatgatgtgaaagatgtagttgatctaatttattcacctacaatggttgtgcaagcgagacaggatcaaatgatcaaccctgaaagtgctgaatttatttatgaacatattgcaacagatgagaaaaaaattaagtggtacgaagagtcgggacacgtcattactttagataaggaaagagatacgttatatgacgatatttatatgtttctagaatcacttaattgggaataa

SEQ ID NO: 904 - protein, 247 aa, Unknown
  Obtained from environmental sample
MKIKKPEPFTFEAGPRAVLLLHGFTGHTADVRMLGRFLEKKGYTSHAPIYRGHGEEPESLIKTTPEDWWNDALSAYNHLKDLGYKEIAIAGLSLGGAFALKLASNNQVKGVIPMCSPMYFDNTEQLTQGFRTFAKQYKQFEKKNTEQIDTEINELMENSVPMFDHIRTFFHDVKDVVDLIYSPTMVVQARQDQMINPESAEFIYEHIATDEKKIKWYEESGHVITLDKERDTLYDDIYMFLESLNWE

SEQ ID NO: 905 - DNA, 927 bp, Unknown
  Obtained from environmental sample
atgcccaaatacagaattcttagtttggacggcggcggaatccgggggctgctcagcgcgattctgctcgagcggttggaagcggaggcacccaattggctgagccaggtggacctgatcgccggcacatccaccggcgggatcatcgccctgggtctcgccaaaggcctcagcccaacccaactgcgcaatctctatcaactgcgcggggcggcgatattcgatgattcatggtgggacgacgtgctcgatattgggaagatttcgggcgcggattatgataacaagcaactcaccaaagagttgaagacgattctcggcaacacgaaactgcgcgagttgtcgaagcgggttttgatttcgagtttcgatctggacagtgaagagcgcgatcccaccaaacgaagttggacgccgaagttcttccacaacttcccgggcatcgacagcgacggcgagcaactggcctacaaggtggcgctgtacaccagtgccgcgccgacgtattttccgaccgtggacgggtacatcgatggcggtgtggtggccaacaaccccagcatggcagccctcgcgcaaacgcaggacacccgcgcgctgaaaacaccgccgcgcttctccgaaatccggctgctctcgatcggcacgggcaaatccctctatcgcatcgaagggcagaacctggactggggctacgcccagtgggccaagccgctcatcaacatcatgatggacggcgtgatgggtgtggcagattaccagtgccggcaggtcctggacgacaattattgccggatttcgcccaccttcccgcccggcgcggtgtttcccttggacggtgtcaaacagattcccgacctggtgacctttgccacttccgtggacctcacgcgcgccgttcagtggatcaagagcaagtgggcttag

SEQ ID NO: 906 - protein, 308 aa, Unknown
  Obtained from environmental sample
  DOMAIN (7)...(191): Patatin-like phospholipase
MPKYRILSLDGGGIRGLLSAILLERLEAEAPNWLSQVDLIAGTSTGGIIALGLAKGLSPTQLRNLYQLRGAAIFDDSWWDDVLDIGKISGADYDNKQLTKELKTILGNTKLRELSKRVLISSFDLDSEERDPTKRSWTPKFFHNFPGIDSDGEQLAYKVALYTSAAPTYFPTVDGYIDGGVVANNPSMAALAQTQDTRALKTPPRFSEIRLLSIGTGKSLYRIEGQNLDWGYAQWAKPLINIMMDGVMGVADYQCRQVLDDNYCRISPTFPPGAVFPLDGVKQIPDLVTFATSVDLTRAVQWIKSKWA

SEQ ID NO: 907 - DNA, 960 bp, Unknown
  Obtained from environmental sample
atgcgcgatggcaggaacttgaacgaattgctggagaatagaccgatggcaacttccttgcaaaaatgcattcacctgggcttctgcctgatagtcctgggcgcggccctgtccgcgcacgcaaagttcgagacccacacccgcgtacccttcgccgaacccgagggtgaaaccttgcgtctgaccctgtggacccccaacaacgccgagaccaagcggcccgggctggtgatgattcacggcggcggctgggccatgggaacgcgcaccatgatgcgctcttacggcgaagccttcgccgacgcgggctatgttgtggcctccatcagttaccgcatgatgcccaagtacgcgttcccgagccaactggaagacgccaaggcggcggtccgctggatgcgcctgaacgccggccaatacggcatcgaccctgaccggatcgcggtaatgggcagttcggcaggcggacaactcgccgcgcttgtcgcgacgacaacaccagaggacggtttcgagggcacggaaaatctggggccttccagcgacgtccaggcggccatcatcatctacggcgcggttgatctcaccgattgggaagaacgtgtcgaagaaagtaaaaacaaagggttctttcggcggaaactcggcggctttctcgaagatttcgtctcccgcgaccaaaaggatgtcgagaatcccttcgaggcggcgtctccggtgacctatgtggacgaaaacacggcgccgatgctgttcatacatggatcgaaggacggcatggtcagcatggatcaaccggacacgatggtccagcgcctcgccgaggcgggcgtgcccgtccgcttcctcgtggcggaagggcagcgccatggcttcgatcatttcagccctacgctacgcaagcgcatgatcgaggaaatgctcaagtttctcgatgaattcatgccggcggagcggtag

SEQ ID NO: 908 - protein, 319 aa, Unknown
  Obtained from environmental sample
  SIGNAL (1)...(41)
MRDGRNLNELLENRPMATSLQKCIHLGFCLIVLGAALSAHAKFETHTRVPFAEPEGETLRLTLWTPNNAETKRPGLVMIHGGGWAMGTRTMMRSYGEAFADAGYVVASISYRMMPKYAFPSQLEDAKAAVRWMRLNAGQYGIDPDRIAVMGSSAGGQLAALVATTTPEDGFEGTENLGPSSDVQAAIIIYGAVDLTDWEERVEESKNKGFFRRKLGGFLEDFVSRDQKDVENPFEAASPVTYVDENTAPMLFIHGSKDGMVSMDQPDTMVQRLAEAGVPVRFLVAEGQRHGFDHFSPTLRKRMIEEMLKFLDEFMPAER

SEQ ID NO: 909 - DNA, 1260 bp, Unknown; identical to SEQ ID NO: 55
  Obtained from environmental sample

SEQ ID NO: 910 - protein, 419 aa, Unknown; identical to SEQ ID NO: 56
  Obtained from environmental sample
  SIGNAL (1)...(26)

SEQ ID NO: 911 - DNA, 906 bp, Unknown
  Obtained from environmental sample
atgagcacggtcggggccgaggaggcacgcatccggttccgctccttcacggtcgacctccgcgatccagcgtcgctgccggcggtcggggaggtcaccgagctgagcgtcgacggcgccgagggcccccgccccgcccggctctaccggccgaccgacgctggtgccgacacgcggttgccactggtggtgttcttccacgggggcggcttcgtgatcggcgacctcgacacccacgagggccaggcacgccgggtgtgccgcgagctcggcgcgctcgtgctcagcgtcgactaccgcctcgcacccgagcatccctacccggccgcccgcgaggactgcctcgccgcgacccgctgggccgccgaccacgccgacgacctcggcgccgaccccgaccggctggtggtcgcgggagacagcgccggcggcaacctcgccgccgtggtcgcccaggactgccgcgacgggcagggcccggcactggccgcccagctcctgatctatccggccaccgacatgaccgatccgggcggggaggtctatccctcccgccaggagaacgccgagggctacttcctcaccggcgacgacatgcgctggttcgagagcagctatctcggcggtgcgacggccggggagcccggcaactccccgatccacggggacctgaccggtcttcccccggccgtggtcgtcaccgcggagttcgatccgctgcgcgacgagggcgaggcctacgcgcgggcgctcgagggggccggcgtgccggtcgtgtcgatccgcttcgacgggctcatccacggcttcttcgacatgggaccgatctcgcccgcgtgtgaccgggcggccgacgagacctgccgggccctgtcggacctgctgcagcccgcggcgtcgggatga

SEQ ID NO: 912 - protein, 301 aa, Unknown
  Obtained from environmental sample
MSTVGAEEARIRFRSFTVDLRDPASLPAVGEVTELSVDGAEGPRPARLYRPTDAGADTRLPLVVFFHGGGFVIGDLDTHEGQARRVCRELGALVLSVDYRLAPEHPYPAAREDCLAATRWAADHADDLGADPDRLVVAGDSAGGNLAAVVAQDCRDGQGPALAAQLLIYPATDMTDPGGEVYPSRQENAEGYFLTGDDMRWFESSYLGGATAGEPGNSPIHGDLTGLPPAVVVTAEFDPLRDEGEAYARALEGAGVPVVSIRFDGLIHGFFDMGPISPACDRAADETCRALSDLLQPAASG

SEQ ID NO: 913 - DNA, 885 bp, Unknown
  Obtained from environmental sample
atgaaaactggtcgaaccatactgatcgcgtttctgttgactgcgttctccattcagacgacctttgcccaaccgaactcggccagcgtcgaaattcagcccgatgtggtgtacggccataaagacggcctggccctgaccatggacgtttatcgccccaccaacgccaatggagcagccatcttgttcatggtaagcggcggctggtactcacgctggcaaccgcccgaacaaacgcagcccatgtttcagccttacttggatgctggctttaccatgatcgccgtctgccacggcagtagtcctcgatattccattcccgagatcgtaccggacgtccgccgggccgtgcggttcgtccgccagaacgccgagcgctggcaacttaaccccgagcgcctgggcgccatgggcatgagcgcaggggggcacttgtcattgatgctcggtacaaccggcgacgacgggtcgccaaactcggcagacgatttgaactcggtctccagccgcgtaaccgccgtcgtggccctggtgcctcccaccgacctgcgtgtcgcggtgtgggaggcccccgaatcgctgccagcgtatcgcaattttccggcgcttgatttgtcgctggaactggccgagcaacattcgcccctggtgcacgtcacctcagatgacgccccggcgctggtccttatgggaggtaaggacgacctggtaccggccagacacggcgagtggatcaaggaggccttcgagcgcgagggggtcgagcacaagctgattatcttccccgacgcaggacacgggctggagggcgagcagactcaagcgaccgttgtgcgcgaggccatcgagtggttcaatgctcacttgctgagtgattaccgatag

SEQ ID NO: 914 - protein, 294 aa, Unknown
  Obtained from environmental sample
  SIGNAL (1)...(23)
MKTGRTILIAFLLTAFSIQTTFAQPNSASVEIQPDVVYGHKDGLALTMDVYRPTNANGAAILFMVSGGWYSRWQPPEQTQPMFQPYLDAGFTMIAVCHGSSPRYSIPEIVPDVRRAVRFVRQNAERWQLNPERLGAMGMSAGGHLSLMLGTTGDDGSPNSADDLNSVSSRVTAVVALVPPTDLRVAVWEAPESLPAYRNFPALDLSLELAEQHSPLVHVTSDDAPALVLMGGKDDLVPARHGEWIKEAFEREGVEHKLIIFPDAGHGLEGEQTQATVVREAIEWFNAHLLSDYR

SEQ ID NO: 915 - DNA, 627 bp, Unknown
  Obtained from environmental sample
atgatcgcggttgatttacccggccatggacgatcaccggcgagcgagtccatttcgattgccgactatgctctgcacgtgatttcgctgcaccaggctctcggcttaccaccagcacttgtcgtcggtcattcaatgggtggcgccatcgcattgcagatcgcgttgaccgcgccgcacatagtggccgggctgggattggtgagcaccgcagcccgtttacgtgtcgctccggcgctactcaccgggctggccggtgatctcgcggcgcgccgtgaagcgatcacaacgctggtcaactggttattcagcccaacagcaagccccgacctgatcaccgatgccctggccgaatataccgcgctcgatccggaactcttactggccgatctccgcgcctgtgacggttttgatctccgttcacgactggccgaaattcgttgtccggcactggtgatcaccggaactgatgatcgactgacgccgccaaaactcggcgccgagctggcggctgggcttggtgttccccaccatctcctgaccgatgttggtcatatgccgatgttggaagcacctgaccgcctgtccgatcagcttttacacctgctgcttgcctgcaataagtag

SEQ ID NO: 916 - protein, 208 aa, Unknown
  Obtained from environmental sample
  DOMAIN (2)...(201): alpha/beta hydrolase fold
MIAVDLPGHGRSPASESISIADYALHVISLHQALGLPPALVVGHSMGGAIALQIALTAPHIVAGLGLVSTAARLRVAPALLTGLAGDLAARREAITTLVNWLFSPTASPDLITDALAEYTALDPELLLADLRACDGFDLRSRLAEIRCPALVITGTDDRLTPPKLGAELAAGLGVPHHLLTDVGHMPMLEAPDRLSDQLLHLLLACNK

SEQ ID NO: 917 - DNA, 786 bp, Unknown
  Obtained from environmental sample
atgcgcgcacaggcaatcgactgcgacggtactgccgccgagtggatcacgctgcccgaatcgcgcgccgaaaaagtcattttctatatccacggcggcgcctggatgttcaagttcccgcgcctgcaccatgccatggtcgcgaagtggtgccgccgtctggatgcgcgcgccctgatggtcgattatcgcctggcgcctgaacacccgttcccaggcggtctcgacgatgtctggtcagcctggcaatggctgctcaccgaaggcatttcgccgcagagtgtcatcgtcgccggcgactcggcagggggcaatctgaccctggcgctgctgcaccggatcaaggccgccggcggggtgatgccggcgtgcgccgtcatgctctcgcccttcgttgatttcaccctgagtagtccgagcatggtaaccaacgaaaaacgtgacccgatgttcagcgtggcggcaatggtcggcctgcgccgccattacctcgcccccgaaaacatgctcagcgcctatgcatcgccactgttcgccgatttcagcggcctgccgccgctgttcttccaggccagcgccagcgaaatgctgcgcgacgactcactgcgcgccgcagcggcagcgcatgacgccggcgttcccgtcgaggtcgaactgtgggacaaggtgccgcacgtctttcaggcgttccaggaactctcgcattcggcggcggcgctagaaacgatcgctgattttgtcgagcgccatgcgaactggatgatgcctggatcaggcgccggctga

SEQ ID NO: 918 - protein, 261 aa, Unknown
  Obtained from environmental sample
MRAQAIDCDGTAAEWITLPESRAEKVIFYIHGGAWMFKFPRLHHAMVAKWCRRLDARALMVDYRLAPEHPFPGGLDDVWSAWQWLLTEGISPQSVIVAGDSAGGNLTLALLHRIKAAGGVMPACAVMLSPFVDFTLSSPSMVTNEKRDPMFSVAAMVGLRRHYLAPENMLSAYASPLFADFSGLPPLFFQASASEMLRDDSLRAAAAAHDAGVPVEVELWDKVPHVFQAFQELSHSAAALETIADFVERHANWMMPGSGAG

SEQ ID NO: 919 - DNA, 762 bp, Unknown
  Obtained from environmental sample
atgggctgcctgtcgttcctggtgctgccactgggatggttgctgccggcccgatggtttcggtgtaccacggaggcgcggctggatcaaggattggtgattgtgcttccgggagtggaaggccgcggttttttgagcttttcgattctgacgggtttggtggatgccggcgtgccgtatgccgtagaggtcatcgactggaccacgggctggaagccgttggcgttgtatcacctgcgggcctggcggcgaaatcaacgggtggcgcggcagattgcagagcgaattgtctgctatcaacgcgactttcccaaccggcccgtgtggatcatcggtcattccggcggcggtggcatggcgttgctcaccgcggcggcgttgccggaagccatgcgcgttaccggcatcgtgctgctcgcacccgccgtgtcaccccaattcgatgtcgccagcgcgctgggcaaggttgagcagggcatctggaaccactattcttggctggactggttctttgtgggactgggaacttcggtgttcggatgcttcgacggtcgccacggaccggctgccggcatggtgggatttcgactgcgcacggaactcatcgcatcgcaccacgcatcaacttcgaaggccgtcatcgagcaaacatgctactcctggcggatgctgcggcaattccatactggtggtcatttcggttgcgcccaccgggtgtttgtagcggagagtatcgctcctttgatgttgcccccgcggtga

SEQ ID NO: 920 - protein, 253 aa, Unknown
  Obtained from environmental sample
MGCLSFLVLPLGWLLPARWFRCTTEARLDQGLVIVLPGVEGRGFLSFSILTGLVDAGVPYAVEVIDWTTGWKPLALYHLRAWRRNQRVARQIAERIVCYQRDFPNRPVWIIGHSGGGGMALLTAAALPEAMRVTGIVLLAPAVSPQFDVASALGKVEQGIWNHYSWLDWFFVGLGTSVFGCFDGRHGPAAGMVGFRLRTELIASHHASTSKAVIEQTCYSWRMLRQFHTGGHFGCAHRVFVAESIAPLMLPPR

SEQ ID NO: 921 - DNA, 1038 bp, Unknown
  Obtained from environmental sample
atgacaacacaatttagaaacttgatatttgaaggcggcggtgtaaaaggtgttgcttacattggcgccatgcagattcttgaaaatcgtggcgtgttgcaagatattcgccgagtcggagggtgcagtgcgggtgcgattaacgcgctgatttttgcgctaggttacacggtccgtgaacaaaaagagatcttacaagccaccgattttaaccagtttatggataactcttggggggttattcgtgatattcgcaggcttgctcgagactttggctggaataagggtgatttctttagtagctggataggtgatttgattcatcgtcgtttggggaatcgccgagcgacgttcaaagatctgcaaaaggccaagcttcctgatctttatgtcatcggtactaatctgtctacagggtttgcagaggtgttttctgccgaaagacaccccgatatggagctggcgacagcggtgcgtatctccatgtcgataccgctgttctttgcggccgtgcgtcacggtgatcgacaagatgtgtatgtcgatgggggtgttcaacttaactatccgattaaactgtttgatcgggagcgttacattgatttggccaaagatcccggtgccgttcggcgaacgggttattacaacaaagaaaacgctcgctttcagcttgatcggccgggccatagcccctatgtttacaatcgccagaccttgggtttgcgactggatagtcgcgaggagatagggctctttcgttatgacgaacccctcaagggcaaacccattaagtccttcactgactacgctcgacaacttttcggtgcgttgatgaatgcacaggaaaagattcatctacatggcgatgattggcaacgcacgatctatatcgatacattggatgtgggtacgacggacttcaatctttctgatgcaactaagcaagcactgattgagcaaggaattaacggcaccgaaaattatttcgagtggtttgataatccgttagagaagcctgtgaatagagtggagtcatag

SEQ ID NO: 922 - protein, 345 aa, Unknown
  Obtained from environmental sample
  DOMAIN (8)...(195): Patatin-like phospholipase
MTTQFRNLIFEGGGVKGVAYIGAMQILENRGVLQDIRRVGGCSAGAINALIFALGYTVREQKEILQATDFNQFMDNSWGVIRDIRRLARDFGWNKGDFFSSWIGDLIHRRLGNRRATFKDLQKAKLPDLYVIGTNLSTGFAEVFSAERHPDMELATAVRISMSIPLFFAAVRHGDRQDVYVDGGVQLNYPIKLFDRERYIDLAKDPGAVRRTGYYNKENARFQLDRPGHSPYVYNRQTLGLRLDSREEIGLFRYDEPLKGKPIKSFTDYARQLFGALMNAQEKIHLHGDDWQRTIYIDTLDVGTTDFNLSDATKQALIEQGINGTENYFEWFDNPLEKPVNRVES

SEQ ID NO: 923 - DNA, 684 bp, Unknown
  Obtained from environmental sample
atgctgaaaccgcctccctacggacgcctgctgcgcgaactggccgatatcccggccatcgtgacggcaccgttccggggcgctgcgaaaatgggcaaactggcggatggcgagccggtactggtgctgcccggcttcctggccgacgacaacgccacctcggtgctgcgcaagaccttcgatgtcgcgggctttgcctgttcgggctgggaacgcggcttcaacctcggcattcgtggcgacctcgtggaccggctggtcgaccggctgcgggcggtgtcggaggcggccggtggtcagaaggtgatcgtggtcggctggagcctcggcggcctctatgcgcgcgagctgggccacaaggcgcccgaactgatccggatggtcgtcacgctcggcagtccgttcgcgggcgacctccacgccaaccatgcgtggaagatctacgaggcgatcaacagccacacggtcgacaacctgccgatcccggtcgatttccagattaagccgccggtgcgcaccatcgcggtgtggtcgccgctcgacggggtggtggcgccggagacctcggaaggctcgcccgagcagtcggacgagcggctagagctggcggtgacccacatgggctttgccgcatcgaagaccggggccgaggctgtggtccggctggtcgcggcgcggctctag

SEQ ID NO: 924 - protein, 227 aa, Unknown
  Obtained from environmental sample
MLKPPPYGRLLRELADIPAIVTAPFRGAAKMGKLADGEPVLVLPGFLADDNATSVLRKTFDVAGFACSGWERGFNLGIRGDLVDRLVDRLRAVSEAAGGQKVIVVGWSLGGLYARELGHKAPELIRMVVTLGSPFAGDLHANHAWKIYEAINSHTVDNLPIPVDFQIKPPVRTIAVWSPLDGVVAPETSEGSPEQSDERLELAVTHMGFAASKTGAEAVVRLVAARL

SEQ ID NO: 925 - DNA, 777 bp, Unknown
  Obtained from environmental sample
atgttcattgcgcaccgaagcggactgcaaccgaatggcgacacgccgacattgctctatggatacggcggtttcaatgctgccgttacaccgcggttttccatatcgcgtcttgcctggatggaaatgggtggcgtctttgcgctggccaacatccggggcggcggcgagtacggtgatgaatggcacaaggccggcaccaagctgaaaaagcagaacgtgttcgacgatttcatcgccgccgcggaatacctggtggccaatcgctacacgcgacctgagaaactcgcagtcatgggtggcagcaacggcggcttgttggttggcgccgtcgtcaatcaaagaccggacctgttcgcagcgggacttccggccgtcggcgtaatggacatgctccgattccacaaatttaccgccggtcgtttctggactgacgattacggctctgcggacaacccggatgagttcaaggcgctgttggcctactcgccctaccataacctcgaagacggaaccgagtaccccgccatcctggtgaccaccgccgacacggatgaccgagtggttcccggtcacagtttcaagtacgcagcgaggttgcaggccgcacaagccggcagcgcaccggtgatgattcgtatcgagacccgcgcgggccatggctccggcaagccgaccgaactgatcatcggtgaggttacggacgaatgggcgttcctggtggacaatctcgacatgcaattgccggagagttacggcgttagcgctgacccataa

SEQ ID NO: 926 - protein, 258 aa, Unknown
  Obtained from environmental sample
  DOMAIN (28)...(107): Prolyl oligopeptidase family
MFIAHRSGLQPNGDTPTLLYGYGGFNAAVTPRFSISRLAWMEMGGVFALANIRGGGEYGDEWHKAGTKLKKQNVFDDFIAAAEYLVANRYTRPEKLAVMGGSNGGLLVGAVVNQRPDLFAAGLPAVGVMDMLRFHKFTAGRFWTDDYGSADNPDEFKALLAYSPYHNLEDGTEYPAILVTTADTDDRVVPGHSFKYAARLQAAQAGSAPVMIRIETRAGHGSGKPTELIIGEVTDEWAFLVDNLDMQLPESYGVSADP

SEQ ID NO: 927 - DNA, 1047 bp, Unknown
  Obtained from environmental sample
atgagaaagaaacaagtgagtatcaggggaaatctgattcgggaaatgatgcgggatgtgatgggaacggctctcggcaagccgattcagtccggggagattagaaggcatccggttgagccggcctggatctgtccgccgggatttatctatgaactgatcgatatggaacatttcaagatggaatatctgcagcctcaggatgtttataccgggcgggtggtgcttcagctgcatggtggcggatatattggcccgatgaagaatatttaccggagctttgctgtgaaatattcaagattaagtatgtatggagatgttttgacgattgattaccgggtggcgccggaacatccatatccggcggcgctggaggatgcgattgctgcgtatcggtggcttttggatgaaaaaaactatcggccggagcaaatcgtggtagcaggagattccgccggtggcggcctggcactggcgttgtgtctgtatctccgggatcatcagattccgctgccggccggtatcatagccatgtcgccctggacggatctgacactaagtggggagtcttatacatctaattatgaccacgatccgctgtttggtaataccagagaaagtatgttgtataattcaacttatattggggacagcgatccgacggatccgtatatgtctccgttgtttggagagtattttggattcccgccggtgttattgcaggtgggggatattgaggtgcttctcagcgatacacttcgggtttctgaaaaattgcgggaggctggggtaaagcagcggctttcggtttatgaaggcatgtttcattcgtttcagatgggactggatctgattccggagagccgtgaagcctgggaagaagtggaacgatttatcgggattgtctgccagattgagcggaaagctgaagggaaaattgttcgccgggtgaaggggaaaacagagaataaagatgaaaatcacattggttacggttggaaaaataaaagaaaaattttaccgggaggcaatttcggaatacagtaa

SEQ ID NO: 928 - protein, 348 aa, Unknown
  Obtained from environmental sample
MRKKQVSIRGNLIREMMRDVMGTALGKPIQSGEIRRHPVEPAWICPPGFIYELIDMEHFKMEYLQPQDVYTGRVVLQLHGGGYIGPMKNIYRSFAVKYSRLSMYGDVLTIDYRVAPEHPYPAALEDAIAAYRWLLDEKNYRPEQIVVAGDSAGGGLALALCLYLRDHQIPLPAGIIAMSPWTDLTLSGESYTSNYDHDPLFGNTRESMLYNSTYIGDSDPTDPYMSPLFGEYFGFPPVLLQVGDIEVLLSDTLRVSEKLREAGVKQRLSVYEGMFHSFQMGLDLIPESREAWEEVERFIGIVCQIERKAEGKIVRRVKGKTENKDENHIGYGWKNKRKILPGGNFGIQ

SEQ ID NO: 929 - DNA, 819 bp, Bacteria
gtgtcccgctctgcggactcggcgcaacaggccgctgcacggtgcataattcttgccatggacccttccaccgtcggtgtcgccctgagccacggcttcacgggcgggctcggcgggatcgcgccgtgggcggatgcgctccgcggcgccgggttccgcgtggccacgcccctcctccccggccacgggacttcgatcgaggacctcgcccgcaggtcgtggcacgagtggtacgacgcctatgaggcggcctacgtcgagctcgccgaggaatgcacggccgtcgtcgctgcggggctgtcgatgggcggggccctggcgctgcgccttgccgcgcaccgccctgtggccgccgtcagcgtggtcaaccccggcctcgtgatcgacgatccgcgctcgcacctctccggcgtgctgcggcacgtgatgcggacggttccgggcatccgcaacgacatcaagctcgcgggccaggacgagggcgcctacgagtcggtgcccgtggccgccgcgcaccagctcaagctcctgttccgggacaccgtcgcgtccctgccgcgcgccaccgccccgctgcaggtcttccgctcgacggtcgacagggtcgtcacgagcgagcgcagcgtcggcgcgatcgccgcccgctacggcgggacggacatccgcatcgtccggctcgccaacagctaccatgtggccactctggaccacgacgccgagacgatcttccggggctcggtcgccttcatcaaggaggcggtcgacgccgcgccgtcggccgccgcctgccgccgcatcgacgctgggggtgcggcgtga

SEQ ID NO: 930 - protein, 272 aa, Bacteria
MSRSADSAQQAAARCIILAMDPSTVGVALSHGFTGGLGGIAPWADALRGAGFRVATPLLPGHGTSIEDLARRSWHEWYDAYEAAYVELAEECTAVVAAGLSMGGALALRLAAHRPVAAVSVVNPGLVIDDPRSHLSGVLRHVMRTVPGIRNDIKLAGQDEGAYESVPVAAAHQLKLLFRDTVASLPRATAPLQVFRSTVDRVVTSERSVGAIAARYGGTDIRIVRLANSYHVATLDHDAETIFRGSVAFIKEAVDAAPSAAACRRIDAGGAA

SEQ ID NO: 931 - DNA, 636 bp, Unknown
  Obtained from environmental sample
atgaaggctaaactttatattttttcaggtttaggtgctgataaacgcattttcgaaaaactcgatttaagtgcattcgattgtgtttttatcgattggattacacctgaaaagaatgaatcgctccaaaattatgcgctaagaatttctaaagatattcccgaaaacgcatcaattcttggtgtttccttcggaggaatgcttgccgtagaaattgcgcatcacaaaaaactgaaccacttgtatttgatttcaactgcaaaaaccaagtttgaacttccaattctttatcgcatagcgggtaaaattggtttggttaatttgcttccttcaaaacttctgaaaaaagcaaatttcatttcgtattggttttttgggatgaaaacaaaagaagaaaagcgcttattgaaagccattttgaatgataccaattcctgttttctcaaatgggcaatgcgagcaatttgtttgtggaataatgaaaaagtacctgagaattatgttcattttcatggttcagctgataagattttaccttatagaaaaattaaaggtgcaataaaaattgaaaacggtggacatttaatggtttattcacaagttaaacaaattaacataaagattgaaccaatttga

SEQ ID NO: 932 - protein, 211 aa, Unknown
  Obtained from environmental sample
MKAKLYIFSGLGADKRIFEKLDLSAFDCVFIDWITPEKNESLQNYALRISKDIPENASILGVSFGGMLAVEIAHHKKLNHLYLISTAKTKFELPILYRIAGKIGLVNLLPSKLLKKANFISYWFFGMKTKEEKRLLKAILNDTNSCFLKWAMRAICLWNNEKVPENYVHFHGSADKILPYRKIKGAIKIENGGHLMVYSQVKQINIKIEPI

SEQ ID NO: 933 - DNA, 894 bp, Unknown
  Obtained from environmental sample
atgacccccgcgcccgacggcacgccactggccaactatgtgtggccagccgcgcccaacgtgcccccgccgatcgccggcctgggcacccccagtatctacctgctgcacggacttagcgagcatgccgggcgctatgaccgcctggcgcgctggctgaccgcacgcggctggacggtgggcgcccatgaccaccgcggccatggccgctccggcgggcggcccgccaccctgaaccatgaggacgatctggtcgtcgatgcggtcgaccgcctgcgggcctggaccgcggcccatggacgcccgcccatcctgctgggccacagcctgggcgcgctggtcgcggtgcggatcgccctgcgccgcctggccgagatcgacggcctggtgctcagttcgccgccgttcgtggtgcacgtgccgccgtgggtgcggcgcaccctgacctggatgtcgctgcatgcgcccgacctgcgcgtgccccacggcctggcgcccgcccgcatttcccacgacccggccgtggtcaaggcctaccgcagcgatccgctggtgcggcgccaaatgacaggacgcctggcgcgcttcgtggacgaaggcggccgcgagtccctgcgtgaagccccgctgctggcctgccgcaccctgctgatggtggcgggcgacgattccatcgtcgctgccgaaggcagccgccagttcgcccagcgcgcacccgccgaactgctgacgctgcgctggtacgacaccgcctggcacgagattttcaatgaaaccgcccccatcgccgacccggtctacgcagacctggacgagtggctggcgcgcaccgctcaggcattgtccctgtccccagtattgactccctcggcacaggaggccggcaccccgtaa

SEQ ID NO: 934 - protein, 297 aa, Unknown
  Obtained from environmental sample
  DOMAIN (58)...(269): alpha/beta hydrolase fold
MTPAPDGTPLANYVWPAAPNVPPPIAGLGTPSIYLLHGLSEHAGRYDRLARWLTARGWTVGAHDHRGHGRSGGRPATLNHEDDLVVDAVDRLRAWTAAHGRPPILLGHSLGALVAVRIALRRLAEIDGLVLSSPPFVVHVPPWVRRTLTWMSLHAPDLRVPHGLAPARISHDPAVVKAYRSDPLVRRQMTGRLARFVDEGGRESLREAPLLACRTLLMVAGDDSIVAAEGSRQFAQRAPAELLTLRWYDTAWHEIFNETAPIADPVYADLDEWLARTAQALSLSPVLTPSAQEAGTP

SEQ ID NO: 935 - DNA, 867 bp, Unknown
  Obtained from environmental sample
atgacgacgacagcttttttcttttcgatgcttatgacaatgctcgtttcgggggttgtatccgcgcagcaaaagccgactatgggttacgcgccggttaacgggcttaagatgtattacgagatccacggcagcggcgagccggtggtattgcttcatggggcgttcatggcaatttcaggcgactggaatgattggataaacgaactttccaaaacgcggaaagtgatcgccatcgaaatgcagggccacgggcgtacggcggatatcaagcgcgatatgacctccgagaacctttcagacgatgtggccgggctgctcgactatctcaagatcccgaacgcggatatcgtcggctacagtttgggcggcggcgttgcgatgcagtgtgcgatccgccatccgcagaaggtgcgaaaggtcgtcagcatttcggctccgatccggcgtgacggctgggtcaaggaagccaacgacttttggccgaacttcacttgggagatgttcaaaggtacgcctgccgaagtcgaatggaaaaaactaaacccgaagccggacgggttcccggcttttttcaatcacctcaaggcgactgcgatgcgcccatacgattttggcgccgacaaattcaaagcgaccaaagctccgatgttcttcatccacggcgacgccgacggcgtccggctcgatcacatcgcggaaatgtaccgcctcaagggcggggatctgcacggcgacatgcggccgcgctcggaatcgagactggccatcttgcctgacacgacccacgttaccttgatgaatcgcatgacgacgatcatcccgatgatcaacgactttctcgatgcgaaacccctaaagcaatag

SEQ ID NO: 936 - protein, 288 aa, Unknown
  Obtained from environmental sample
  SIGNAL (1)...(22)
  DOMAIN (74)...(279): alpha/beta hydrolase fold
MTTTAFFFSMLMTMLVSGVVSAQQKPTMGYAPVNGLKMYYEIHGSGEPVVLLHGAFMAISGDWNDWINELSKTRKVIAIEMQGHGRTADIKRDMTSENLSDDVAGLLDYLKIPNADIVGYSLGGGVAMQCAIRHPQKVRKVVSISAPIRRDGWVKEANDFWPNFTWEMFKGTPAEVEWKKLNPKPDGFPAFFNHLKATAMRPYDFGADKFKATKAPMFFIHGDADGVRLDHIAEMYRLKGGDLHGDMRPRSESRLAILPDTTHVTLMNRMTTIIPMINDFLDAKPLKQ

SEQ ID NO: 937 - DNA, 1437 bp, Unknown
  Obtained from environmental sample
atgaagatcagtgatatcgatgtcgatgccatcatcgagaatgccaggcagcagctgaaggatgacccttctgtatctccatcgttacgctctacgtttgagatactcctgttaatcattccaatactcttaggtcgcgtcagcaccaacagtcggaacagtagtaagccaccatcacaagatcctaaccgtgaaaagaaagcacgtgctaagagtgatcgtaaacccggcggccaacaaggacgcataggcacaacactcgtgcctaccgatgatcccgatgagatcaaagtcgtcaccgtagatcgtcggactttacccagaggccatacgtttaaacccgctggctttgaaaagcgacaagtatttgatatcgatatcagtcgtctagtcacagagtatcgcgctgaaatactggtagatgatcagggtaatcgtatcgtcgctcctttccccgaagcggttaagtcatctgttcaatatggtccggcgatcaaggcgcatgcagtttatttatcactgtatcagttgttgccctatgaccgcgtgcgtgagtattttgaagaccaacttcgtatcccgttgagtgtcggttcgttggttaacttcaataaagaagcattcgacaaagctgcacccttcgaagcctgggtgaaacgccagttgattcaatctcccgtggttcatgccgacgaaaccggcatcaatatcggtggtaagcggcattggttgcactgtgcatcgaatgacacgctaacctggcttgaacctcacaagcaaagagggcatcaggctatggatgatatcgggatattaccgtactttgccggtacgctctgtcatgatcactggaaaccctattatcgctataccgattgtgaccactcgctgtgtaatgctcatcatatacgcgagcttcaacgtgttgttgaacaagacaagcatgtctggccggagcggatgcagacactactttgcacgatgaatgacgcggtgatcaatgccggttgtgcactaacaccggaacaagtagccggttggcgaaaagcctatcgggactgcttaaagacggccgagatagagtgtccaccacccgatgaagcacaacgtgatggaaaacggggccgaatcaaacgtacaaccgctcggaacttactcgaaagactgagggacttcgaggatgatctactgaggtttttagatcatcctcaggtgccctttaccaacaatcagggtgaacgggatatacggatggtcaaggtacagcaaaaaatatcagggtgcttccgctcagaagaaggcgctcagaccttctgtcgtgtgcgcagttatttatcgacggcgcgaaagcagaacatcagtgcatctgaagcaatgacgtccttgtttaatggtgagcctttgccctttgtgaacgaagcagaccatactaaataa

SEQ ID NO: 938 - protein, 478 aa, Unknown
  Obtained from environmental sample
MKISDIDVDAIIENARQQLKDDPSVSPSLRSTFEILLLIIPILLGRVSTNSRNSSKPPSQDPNREKKARAKSDRKPGGQQGRIGTTLVPTDDPDEIKVVTVDRRTLPRGHTFKPAGFEKRQVFDIDISRLVTEYRAEILVDDQGNRIVAPFPEAVKSSVQYGPAIKAHAVYLSLYQLLPYDRVREYFEDQLRIPLSVGSLVNFNKEAFDKAAPFEAWVKRQLIQSPVVHADETGINIGGKRHWLHCASNDTLTWLEPHKQRGHQAMDDIGILPYFAGTLCHDHWKPYYRYTDCDHSLCNAHHIRELQRVVEQDKHVWPERMQTLLCTMNDAVINAGCALTPEQVAGWRKAYRDCLKTAEIECPPPDEAQRDGKRGRIKRTTARNLLERLRDFEDDLLRFLDHPQVPFTNNQGERDIRMVKVQQKISGCFRSEEGAQTFCRVRSYLSTARKQNISASEAMTSLFNGEPLPFVNEADHTK

SEQ ID NO: 939 - DNA, 1017 bp, Unknown
  Obtained from environmental sample
atgaagttgatcttgattttgggattaagccttagcctgatggcgtgcggtgatgcaagctttcagcgggagaacgattccgatcgaagcccgactcctcaggaacaggaaaacgcggagtcgcctcgtgaggaggctgtgcctggttcatcggaccaaattcccgaaacgacttccactcagccgactgaaggaaaagaaaaagacaaagaagaagaaaaagcacttgaagctcttcagtacccaggtcgcacaggtccttacgctgttatcccgtacacggatactctcgcagatccgggctattcctcggccatcgtctattatccaagtgatcccaaagccaccatcatcggcgcgacgacgttaagcggtggtttcaccaacaccaaggagcagatgtcgtggcttggccagcatctggccagtcatggtatcgttgccctggttttcacgccgacgaataatcagtcgctcaatcccgcggtctgggccactggccataaggcgggttttcaaaagctgactgcggaagcccaacgtgtgggcagtcccattcaaggtcggatcgatgtgaagaaaattgggatcatgggtttttccatgggcggcgctggaacgatcctcgctgtgaacgagctcggcactgcggtcaaggccgcagttcccatctgcgctttccgcccggtcacacccacagccgccataccgtggatgctgctgacaggcaccaacgatacggtggctgttcctggaaacatcatcaatgcctatgaagccatgcagggaacaagtcccagagctttggccaattttcgtggcatgacgcatctggacgttcccaacggcggagcggcggctcagcacgaaaacctcgcgtattatgccacggcctggtacagggtttatttgggtggagacctgcgttatcaaacgtatctgtcgggtgatgagcagaagaagaagatcgatgcgggaacatttgcgaacgcgaatgactttcggttgatgccgtaa

SEQ ID NO: 940 - protein, 338 aa, Unknown
  Obtained from environmental sample
MKLILILGLSLSLMACGDASFQRENDSDRSPTPQEQENAESPREEAVPGSSDQIPETTSTQPTEGKEKDKEEEKALEALQYPGRTGPYAVIPYTDTLADPGYSSAIVYYPSDPKATIIGATTLSGGFTNTKEQMSWLGQHLASHGIVALVFTPTNNQSLNPAVWATGHKAGFQKLTAEAQRVGSPIQGRIDVKKIGIMGFSMGGAGTILAVNELGTAVKAAVPICAFRPVTPTAAIPWMLLTGTNDTVAVPGNIINAYEAMQGTSPRALANFRGMTHLDVPNGGAAAQHENLAYYATAWYRVYLGGDLRYQTYLSGDEQKKKIDAGTFANANDFRLMP

SEQ ID NO: 941 - DNA, 792 bp, Unknown
  Obtained from environmental sample
atgccatacctgcaacgaaaacagaccggaatctactgggagtcactgggccagggcgagcctgttgccttcctcaacggtatcctgatgacggtcgactcgtggaagcttcagaccgtcgagatcggccggcacttccgctgcgtcatgcacgactttcgcggccagttgcgaagttcaaaaccggacacgtcctggacactggaagaccacgcgaaggatttgaaagcgctgctggatcatctcggtatcgataactgtcacatcgttggcacgtcctacggcggcgaagtcggaatgatctttgccgccacctggcccgagcgggtccgcagcctgagtgtgatcgcttcggtgagtgaactggggccggacaccgaacgcatcgtgcgggactggcgccgggcggcattggaggcgccgatgtccctgtaccgcaccatgctgccaacgacgttttcaccggagttcgtggcggcgaaccccgggttgatcgaacagggtgaagaacggctgaaagccttcgataaagcattcttcgaggccttcgccagcctggttgacgcattctgcgcgctgaacatcacgcccatcctcgacaggatacgatgtccggcactggtcattgccggcgaaaatgatttgctcaaaccacctcgatacagccagatcatcgccgatggcatcgaaggatccgagcttctggtggcgcctggcgccggtcatgcggtcgtcctggaacaacccgcgttcataaaccggaagttgcttgactttatgggtcagcgctaa

SEQ ID NO: 942 - protein, 263 aa, Unknown
  Obtained from environmental sample
  DOMAIN (46)...(258): alpha/beta hydrolase fold
MPYLQRKQTGIYWESLGQGEPVAFLNGILMTVDSWKLQTVEIGRHFRCVMHDFRGQLRSSKPDTSWTLEDHAKDLKALLDHLGIDNCHIVGTSYGGEVGMIFAATWPERVRSLSVIASVSELGPDTERIVRDWRRAALEAPMSLYRTMLPTTFSPEFVAANPGLIEQGEERLKAFDKAFFEAFASLVDAFCALNITPILDRIRCPALVIAGENDLLKPPRYSQIIADGIEGSELLVAPGAGHAVVLEQPAFINRKLLDFMGQR

SEQ ID NO: 943 - DNA, 327 bp, Unknown
  Obtained from environmental sample
atgaggcatccgtcctttcgcccggcggcgatcgtcgccgccctgatcgtttggttggccgcgccgctctcagccggcggcgcgccggaggaggtgctcgcgcgcgtcgaggtggtcggactgctcgaggagctggggctgccggtccacgcccacctgatgggcggcgacggccgcgactacgcgctcgtcatcgcccggcccgaggcgctcgccgccgcgggttggccgtttaccgtcctgcaccggggggcggatccgaagccgagagccgaatggcggagcaaatcgcggcggctcgtgaatggcacagtgggatggaggtga

SEQ ID NO: 944 - protein, 108 aa, Unknown
  Obtained from environmental sample
MRHPSFRPAAIVAALIVWLAAPLSAGGAPEEVLARVEVVGLLEELGLPVHAHLMGGDGRDYALVIARPEALAAAGWPFTVLHRGADPKPRAEWRSKSRRLVNGTVGWR

SEQ ID NO: 945 - DNA, 759 bp, Unknown
  Obtained from environmental sample
atgggcaaacaaatgccttatagagtgatttttccagtaaactaccaaacttccaaaaaacgctatccagtgatttaccttctgcacggcctttcgggcaattacaaaaactggaccgagaaaaccaaattgacaaaatatgcaaccgaatacaacttcttgattatcacagttgaaggcgagaacggttggtattctgacagtaaaatcaaacctaacaggctttacgaaagctacataatccaggaactgatacctgaagttgataaaaagtttcgcacaatagcagatcgcaatcacagagctatcgcaggtctttcgatgggtggttacggtgcgataaagtttggcttgaaatatcctgaaaaattcgctttgattgggtcctttagcggcgctcttgcggcaacttcaatcaaggaaggcacagcgcttgagtggattacaaaaaccatcaatgatgctttcggtcctgaaggaagcgaatccagaaaagaaaacgatattttccagattgcgcgcgacctgaatgatgaacaaataaagaaacttccctttatttactttgattgcggaaccgaagattttctgttcaaagacaatcaggatttcatgaaactacttgttgaaaagagaatcaaacacgaatatagacaaaagcccggcacccatacgtgggaatactgggatagccaaataaaagaattcttgggtttagccaacaaatttatagaaaaaactgctttatggcgatactaa

SEQ ID NO: 946 - protein, 252 aa, Unknown
  Obtained from environmental sample
  DOMAIN (1)...(240): Putative esterase
MGKQMPYRVIFPVNYQTSKKRYPVIYLLHGLSGNYKNWTEKTKLTKYATEYNFLIITVEGENGWYSDSKIKPNRLYESYIIQELIPEVDKKFRTIADRNHRAIAGLSMGGYGAIKFGLKYPEKFALIGSFSGALAATSIKEGTALEWITKTINDAFGPEGSESRKENDIFQIARDLNDEQIKKLPFIYFDCGTEDFLFKDNQDFMKLLVEKRIKHEYRQKPGTHTWEYWDSQIKEFLGLANKFIEKTALWRY

SEQ ID NO: 947 - DNA, 2022 bp, Unknown
  Obtained from environmental sample
atgaacaacaacgaacaaccgacaaaacgccgcggcataacggtggaagatttgcttcgcctccgctcggtgcgcgacccgcactacgcgccggacgggacgcgcgccgtgtttgtggaaaaatcgattgatgaggaaaaacaataccgctcccatttatggatatgggcggcagacggctccgtccgtcaatggacgttcggccgctggcgcgacatgaagccgcgtttttccccaagaggtgaaatgatcgcctttttatctgaccgctccggacgcacacagctttggcttttgcccgccaatggcggtgaggcgcgccaactgacgtttttcaaaaacggtgtgcgcgattacgtttggtcgccggacgggacgtttctcatcgccctaacgacgcttggcgacgaagaaacgatcgaagaccgagaagagcagaaaacggcggaacaaaaaccggccgattcgaagccgcgcgttgtggaacggctctattacaaatcagacgcgtcgggttttcttgacggcaagcaggacgtgctggtgcgcatcgatgcggcgtcaggaaaaagcgaagcgttgacgggccgcgaggaagaaatcggttcgtttgccgtttccccaaccggacggacgctcgcctttgtcgccaaccgaaacgatgatccagacacaacctttacgcgcgacattgttttgcttgatctcgaatcgaaagcggaaacgaacttgacgaacggatgcggcacattcgcttcgctcgcctggtcgccggacggaacgaagctcgccgccatcggccatgatcttgcttatctcggggctacgcttcaccggctttacgtctttgagccggagcgtggaacgaagcgggtgttgaccgccgattgggacgtccatctcggcgatgccatggtcggcgacacacacgctgatgcgaaagggccgggaccgatttgggcgagcgacggaagcggcctgtatgtcaccgcctcggagcgcggacgcgtcaacttgtatttcgtcccgctcgacggcccgatcgttccggtgatcgaaggcaacttccatttatacggtttagccatccacccaagcgaacagcaagccatcgccgccatgagcgagccgacggtcattggcgatttgtatataatctcgcttgaagacggaacgaaaacacggcttacgcgtgccaatgaagcgctcgaaaacgaagtggtgttcgccgatgccgaaccgtttacgtatcgatcggcggatggttgggagattcaaggctggatcatgaaaccgcccgggcttggcgaaggggaaaaggcgccgcttgtcgtcgaaattcacggcgggccgcatgcgatgtacgggtttacctttttccatgaatttcaactgctcgtttcgcgtggttatgcggtcttgttcacgaacccgcgcggcagccacggatatggacaggcattcgtcaatgccgtgcgcggcgactatggcggcatggattatgaagacattatggccggcgtcgacgccgcgatcagcaagttcgacttcattgacgagacatggcttggcgtcactggcggcagctacggcgggtttatgaccaattggatcgtcgggcataccgaccggttcaaagcggctgtcacccagcgttccatttccaactggctcagtttctccggagtgagtgacatcggctactttttcacaaaatgggaggtcggctgcgacatctgggaagacgcggagcggctttggcatcattcaccgctcaaatacgtccaaaacatgcgcacaccgctcttaatcttgcatagcgagcgcgattaccgctgcccgatcgagcaggcggaacagctgtttatcgcattgaaacaactcgggcgggaaacgaaacttgtccgcttcccggacgccaaccacgatttgtcgcgcaccggcaacccggcgcttcgcctcgaacgtcttcgccaaatcgtcggttggtttgatcattatttgaaaggaccactggattaa

SEQ ID NO: 948 - protein, 673 aa, Unknown
  Obtained from environmental sample
MNNNEQPTKRRGITVEDLLRLRSVRDPHYAPDGTRAVFVEKSIDEEKQYRSHLWIWAADGSVRQWTFGRWRDMKPRFSPRGEMIAFLSDRSGRTQLWLLPANGGEARQLTFFKNGVRDYVWSPDGTFLIALTTLGDEETIEDREEQKTAEQKPADSKPRVVERLYYKSDASGFLDGKQDVLVRIDAASGKSEALTGREEEIGSFAVSPTGRTLAFVANRNDDPDTTFTRDIVLLDLESKAETNLTNGCGTFASLAWSPDGTKLAAIGHDLAYLGATLHRLYVFEPERGTKRVLTADWDVHLGDAMVGDTHADAKGPGPIWASDGSGLYVTASERGRVNLYFVPLDGPIVPVIEGNFHLYGLAIHPSEQQAIAAMSEPTVIGDLYIISLEDGTKTRLTRANEALENEVVFADAEPFTYRSADGWEIQGWIMKPPGLGEGEKAPLVVEIHGGPHAMYGFTFFHEFQLLVSRGYAVLFTNPRGSHGYGQAFVNAVRGDYGGMDYEDIMAGVDAAISKFDFIDETWLGVTGGSYGGFMTNWIVGHTDRFKAAVTQRSISNWLSFSGVSDIGYFFTKWEVGCDIWEDAERLWHHSPLKYVQNMRTPLLILHSERDYRCPIEQAEQLFIALKQLGRETKLVRFPDANHDLSRTGNPALRLERLRQIVGWFDHYLKGPLD

SEQ ID NO: 949 - DNA, 909 bp, Unknown
  Obtained from environmental sample
atggcaggtgctaagtcaaagattccgctcttgattgtttttatgatgagctggtacagttattctttttcccaggataggacagagactcatccggggagcgtggtatatgaatctgtggaattggagagtgaaattctggggaagattgttcgatacaatatttatctgcccaaagactatcataccagtacaatgaaatatccggtactttatctgctgcacgggtatagtgacgatgagacgggatggactcagttcggtcaggtcaaacgaatagcggatgacttgatcgatgcacatgaagccgcacagatggtaattgtgatgccggatgcgggagttacctggtatgtgaattgtgctgatgaagcagaaaaatacgaagatttctttattcgggaattgatgccgcatattgagcaggaatataaagtgcggaaaggaagacagttttccggtgtggctggattgtcgatgggcgggtatggagctttgatgttgagtcttcgacatccggatcttttttcttctgcgggtgttctgagtgcaggagtttttacggatgatgaaatcctcgatatggagcaggcgcaatgggatcgtttgctggggcttcctttcggaaaaggtttatctggtcaggatcgtctggcaggtaattatcagaagtattctcctgaaaagctgatcgctgcttataaagaaaagcaggggaatgttcggttttatatcgattgcggggacgatgattttttgatcctggggaatatgaacctgcatgcgatgatgattcaagagaaagtatcgcacgaattcagggtgcgggacggagggcatacctggggctattggcggagtggattgagatcagttctcccctttataagtgaagtattccaccggtag

SEQ ID NO: 950 - protein, 302 aa, Unknown
  Obtained from environmental sample
  SIGNAL (1)...(24)
  DOMAIN (32)...(296): Putative esterase
MAGAKSKIPLLIVFMMSWYSYSFSQDRTETHPGSVVYESVELESEILGKIVRYNIYLPKDYHTSTMKYPVLYLLHGYSDDETGWTQFGQVKRIADDLIDAHEAAQMVIVMPDAGVTWYVNCADEAEKYEDFFIRELMPHIEQEYKVRKGRQFSGVAGLSMGGYGALMLSLRHPDLFSSAGVLSAGVFTDDEILDMEQAQWDRLLGLPFGKGLSGQDRLAGNYQKYSPEKLIAAYKEKQGNVRFYIDCGDDDFLILGNMNLHAMMIQEKVSHEFRVRDGGHTWGYWRSGLRSVLPFISEVFHR

SEQ ID NO: 951 - DNA, 918 bp, Unknown
  Obtained from environmental sample
atgcatcactttatgccctcacttattctagcctgcggcgtgttcgcgacattcgcgtcacccgcggtggcgaccgaaacgaccgctgcggccgcgaatgtgaaaataacgaccgatcgagtttacggttcgatagccggcgtggagctgctgtgcgacatctacacccccgctgctggctatgcggttggcaaacgaccggtggtgttgctgattcacggcggggcttggtccgccggcagccgccggacgatggccgggcatgcgatgcggctggccagggcggggatcgtcggcatcgcgatcgattatcggctcgctccggcctggaagtttccggcccagttggacgatgttcgcgccgccatggtgtgggctgccgacaatgcagaggagctgggaatcgatccggcacggatggggctgtttggctatagcgccggcggacacctcgcctgtatgattgggacgctggtggatgagccagaaaatacgcaaatggcgaccaccgattggcagcgcgatgacccgcgattggcgcggttgccgcagccgttggcgatctgtgctggcggccccccctgcgacctcagcgaactcgcagtgggcagcaatgggctcgcgttttttctcggcggcagtcccacagagttgcctgaagtgtaccgggcggcctcaccggtttctcatgcctcggcgggcgatacgccgacgctgtatatccacggggaacgcgacgcgatcgtcccgctgcaaaacagcaaatcgctttaccgagcccagcggcaagccggtgtcccgagcgagttcttgatgatcccacagcaggggcacatcgtgacgtttgtcaatccgaaggctaaagatgcgatggtcgaattcttcgataaatggttcaatcaggaaagtccattatga

SEQ ID NO: 952 - protein, 305 aa, Unknown
  Obtained from environmental sample
  SIGNAL (1)...(24)
MHHFMPSLILACGVFATFASPAVATETTAAAANVKITTDRVYGSIAGVELLCDIYTPAAGYAVGKRPVVLLIHGGAWSAGSRRTMAGHAMRLARAGIVGIAIDYRLAPAWKFPAQLDDVRAAMVWAADNAEELGIDPARMGLFGYSAGGHLACMIGTLVDEPENTQMATTDWQRDDPRLARLPQPLAICAGGPPCDLSELAVGSNGLAFFLGGSPTELPEVYRAASPVSHASAGDTPTLYIHGERDAIVPLQNSKSLYRAQRQAGVPSEFLMIPQQGHIVTFVNPKAKDAMVEFFDKWFNQESPL

SEQ ID NO: 953 - DNA, 1629 bp, Unknown
  Environmental
atgagcctttgcgtcattcgattcatcgccggaactttggtacttgtggcgtcagtggaatcggcagttgctcaacaagcgtgtgctgacctgatgggcctcgagctgccgtatacaacgataacgtccgctgcagtggctaccgagggcccaatcccacagccggcgatctttggaagcactgaccccattgtggctccagagcgatgtgaagtgcgggcggtcacgcgccctacgaaggactccgagattcgaatcgagctctggctgccgctctccggatggaacggaaagtatctacaaattggtagcggtggctgggctggttcgatcaatcgaacggggctgataggccctcttcagcgcggttatgccgtagccgcaaccgacaatggccatatcagcgaaggtttggtgcctgacgcctcctgggctatcggccatccgcaaaagctgatcgatttcggttatcgcgccgtgcacgaaacaagtgttcaggccaaagctatcctgcgcgcctactttggccgcggtcaggatctgagctacttcagcggttgttctaatggcggacgcgaggctctcatggaggcgcagcgctatccggaagatttcgaaggcatcatcgccggagcgcccgcgaacaattggtcgcgcctgtttacggggtttgtgtggaatgaacgcgcgttggcggacgatccaattcctcctgccaagttgacagcgattcaggcggcggcaattgctgcgtgtgatacgctggacggtgttgaggacgggctcatcgaaaacccacgagcgtgtagcttcgatccgcgttcaatggtctgtacagccgatgatgcctctgactgtctgacagaaggacaggtcgcgacgctacacaggatatatagcggcccaaccaatcctcggaccggtgagcgaatctttccaggctatccgatgggcaccgaagccgtgccgggcggatgggtaccgtggatcgtgtccgcgagctccgaagttccgagcatacaagcaagctttggcaactcctattacgggcacgcggtcttcgagcaatcgaactgggatttcaggacgttggatttcgaccaggacgttgcgtttggcgatgcgaaggcggggccggtgctcaatgccacgaaccccgatctgcgttcgtttcgcgcgaatggcggcaaactgattcagtatcatggctggggcgatgcagccattacggcttttagttcgatcgactactacgagaacgtgcgcgccttcctcgatcgcttccccgacccccgaagcgagaacacggatatcgacggtttctatcgcctgttcctggttccgggcatgggacattgctccggcgggatcggcccaagtagctttggcaatggcttccgttccgcacgtacggatgccgagcacgacctactctccgcccttgaggcatgggtggagcgagacacggccccggagagattgatcggaacggggacggccgtaggcgacccaaccgcgactctgacgcgtccgctatgcccatatccgcggacggcacggtatctcggaagcggcaactcaaatgatgcggccaacttcgagtgcgccctgcccgctggcgtgcagtag

SEQ ID NO: 954 - protein, 542 aa, Unkown
  Environmental
  SIGNAL (1)...(24)
MSLCVIRFIAGTLVLVASVESAVAQQACADLMGLELPYTTITSAAVATEGPIPQPAIFGSTDPIVAPERCEVRAVTRPTKDSEIRIELWLPLSGWNGKYLQIGSGGWAGSINRTGLIGPLQRGYAVAATDNGHISEGLVPDASWAIGHPQKLIDFGYRAVHETSVQAKAILRAYFGRGQDLSYFSGCSNGGREALMEAQRYPEDFEGIIAGAPANNWSRLFTGFVWNERALADDPIPPAKLTAIQAAAIAACDTLDGVEDGLIENPRACSFDPRSMVCTADDASDCLTEGQVATLHRIYSGPTNPRTGERIFPGYPMGTEAVPGGWVPWIVSASSEVPSIQASFGNSYYGHAVFEQSNWDFRTLDFDQDVAFGDAKAGPVLNATNPDLRSFRANGGKLIQYHGWGDAAITAFSSIDYYENVRAFLDRFPDPRSENTDIDGFYRLFLVPGMGHCSGGIGPSSFGNGFRSARTDAEHDLLSALEAWVERDTAPERLIGTGTAVGDPTATLTRPLCPYPRTARYLGSGNSNDAANFECALPAGVQ

SEQ ID NO: 955 - DNA, 555 bp, Staphylothermus marinus F1
atgtctttaaacaagcactcttggatggatatgataatatttattctcagcttttctttcccattaacaatgatcgcattagctatctctatgtcgtcatggtttaatatatggaataatgcattaagcgatctaggacatgctgttaaaagcagtgttgctccaatattcaatctaggtcttgcaattggtgggatactaattgttatagttggtttaagaaatctttattcgtggagtagagttaaaggatctttaatcatatccatgggtgtatttcttaacttaataggggttttcgacgaagtatatggttggatacatttcctagtctcagtattgtttttcttatcaataatagcatatttcatagctatatcaatacttgacaaatcatggatagctgttctactaataataggtcatattgcaatgtggtatctacactttgcttcagagattccgagaggtgcggctattcccgagttattagcggtattctcgtttttaccattctatataagagactattttaaatcatacactaaacgatag

SEQ ID NO: 956 - protein, 184 aa, Staphylothermus marinus F1
  SIGNAL (1)...(28)
MSLNKHSWMDMIIFILSFSFPLTMIALAISMSSWFNIWNNALSDLGHAVKSSVAPIFNLGLAIGGILIVIVGLRNLYSWSRVKGSLIISMGVFLNLIGVFDEVYGWIHFLVSVLFFLSIIAYFIAISILDKSWIAVLLIIGHIAMWYLHFASEIPRGAAIPELLAVFSFLPFYIRDYFKSYTKR

SEQ ID NO: 957 - DNA, 1041 bp, Pyrodictium TAG11
atgaaactccttgagcccacaaatacctcctacacgctgttacaggatttagcattgcattttgcattttactggtttctggccgtgtatacgtggttacccggtgtcctagtccggggcgtagctgtggacacaggggtggctcgggtgcctgggctcggccggcgcggtaagaggctgctcctggccgctgtggctgtcttggcgcttgttgtgtccgttgttgtcccggcttatgtggcgtatagtagtctgcacccggagagctgtcggcccgttgcgccggaggggctcacctacaaagagttcagcgtgaccgcggaggatggcttggtggttcggggctgggtgctgggccccggcgctgggggcaacccggtgttcgttttgatgcacgggtatactgggtgccgctcggcgccctacatggctgtgctggcccgggagctcgtggagtgggggtacccggtggttgtgttcgacttccggggccacggggagagcgggggctcgacgacgattgggccccgggaggtgctggatgcccgggctgtggtgggctatgtctcggagcggttccccggccgccggataatattggtggggttcagtatgggcggcgctgtagcgatcgtggagggtgctggggacccgcgggtctacgcggtggctgctgatagcccgtactataggctccgggacgtcataccccggtggctggagtacaagacgccgctgccgggctgggtgggtgtgctggccgggttctacgggaggctgatggcgggcgttgacctcggcttcggccccgctggggtggagcgcgtggataagccgttgctggtggtgtatgggccccgggacccgctggtgacgcgggacgaggcgaggagcctggcgtcccgtagcccgtgtggccgtctcgtcgaggttcctggggctggccacgtggaggccgtggatgtgctcgggccgggccgctacgcagacatgctgatagagctggcgcacgaggagtgccctccgggggccggtggctga

SEQ ID NO: 958 - protein, 346 aa, Pyrodictium TAG11
MKLLEPTNTSYTLLQDLALHFAFYWFLAVYTWLPGVLVRGVAVDTGVARVPGLGRRGKRLLLAAVAVLALVVSVVVPAYVAYSSLHPESCRPVAPEGLTYKEFSVTAEDGLVVRGWVLGPGAGGNPVFVLMHGYTGCRSAPYMAVLARELVEWGYPVVVFDFRGHGESGGSTTIGPREVLDARAVVGYVSERFPGRRIILVGFSMGGAVAIVEGAGDPRVYAVAADSPYYRLRDVIPRWLEYKTPLPGWVGVLAGFYGRLMAGVDLGFGPAGVERVDKPLLVVYGPRDPLVTRDEARSLASRSPCGRLVEVPGAGHVEAVDVLGPGRYADMLIELAHEECPPGAGG

SEQ ID NO: 959 - DNA, 789 bp, Archaeoglobus venificus
atgccatatgttaggaatggtggtgtaaatatctattatgaactggtggatggacctgagccaccaattgtctttgttcacggatggacagcaaatatgaatttttggaaagagcaaagacgttattttgcaggcaggaatatgatgttgtttgtcgataacagaggtcatggcaggtccgataagccacttggatacgatttctacagatttgagaacttcatttcagatttagatgcggttgttagggagactggagtggagaaatttgttctcgtcggacattcattcggaacaatgatctctatgaagtactgttcggagtatcggaatcgggttcttgctctaatcctcataggtggtgggagcagaataaagcttctacacagaattggatatcctttagcaaagattcttgcatccattgcatacaagaagtcttcaagattggtcgcagatctttcctttggcaaaaatgctggtgaacttaaagagtggggatggaaacaggcaatggattatacaccctcctacgtggcaatgtacacgtacagaactctaacgaaagtgaatcttgaaaatatcttggagaaaatagactgtccaacactgattatcgttggagaagaggatgcactattgcccgttagcaaatcagttgagctgagcaggaggatagaaaactcaaagcttgtgatcatcccaaactcggggcattgcgtaatgcttgagagtccaagtgaggttaatagagcaatggacgaattcatttcttcagcacagttctaa

SEQ ID NO: 960 - protein, 262 aa, Archaeoglobus venificus
MPYVRNGGVNIYYELVDGPEPPIVFVHGWTANMNFWKEQRRYFAGRNMMLFVDNRGHGRSDKPLGYDFYRFENFISDLDAVVRETGVEKFVLVGHSFGTMISMKYCSEYRNRVLALILIGGGSRIKLLHRIGYPLAKILASIAYKKSSRLVADLSFGKNAGELKEWGWKQAMDYTPSYVAMYTYRTLTKVNLENILEKIDCPTLIIVGEEDALLPVSKSVELSRRIENSKLVIIPNSGHCVMLESPSEVNRAMDEFISSAQF

SEQ ID NO: 961 - DNA, 756 bp, Aquifex pyrophilus
ttgagattgaggaaatttgaagagataaacctcgttctttcgggaggagctgcaaagggcatagcccacataggtgttttgaaagctataaacgagctcggtataagggtgagggctttaagcggggtgagcgccggggcaatcgtttcggtcttttatgcctcaggctactcccctgaagggatgttcagccttctgaagagggtaaactggctgaagctgtttaagttcaagccacctctgaagggattgatagggtgggagaaggctataagattccttgaggaagttctcccttacaggagaatagaaaaacttgagataccgacgtatatatgcgcgacggatttatactcgggaagggctctatacctctcggaagggagtttaatccccgcacttctcggcagctgtgcaattcccggcatatttgaacccgttgagtataagaattacttgctcgttgacggaggtatagttaacaaccttcccgttgagccctttcaggaaagcggtattcccaccgtttgcgttgatgtccttcccatagagccggaaaaggatataaagaacattcttcacatccttttgaggagcttctttcttgcggtccgctcaaactccgaaaagagaaaggagttttgtgacctcgttatagttcctgagcttgaggagttcacaccccttgatgttagaaaagcggaccaaataatggagaggggatacataaaggccttagaggtactttctgaatag

SEQ ID NO: 962 - protein, 251 aa, Aquifex pyrophilus
MRLRKFEEINLVLSGGAAKGIAHIGVLKAINELGIRVRALSGVSAGAIVSVFYASGYSPEGMFSLLKRVNWLKLFKFKPPLKGLIGWEKAIRFLEEVLPYRRIEKLEIPTYICATDLYSGRALYLSEGSLIPALLGSCAIPGIFEPVEYKNYLLVDGGIVNNLPVEPFQESGIPTVCVDVLPIEPEKDIKNILHILLRSFFLAVRSNSEKRKEFCDLVIVPELEEFTPLDVRKADQIMERGYIKALEVLSE

SEQ ID NO: 963 - DNA, 789 bp, Thermococcus CL-2
atggaggtttacaaggccaaattcggcgaagcaaagctcggctgggtcgttctggttcatggcctcggcgagcacagcggaaggtatggaagactgattaaggaactcaactatgccggctttggagtttacaccttcgactggcccggccacgggaagagcccgggcaagagagggcacacgagcgtcgaggaggcgatggaaatcatcgactcgataatcgaggagatcagggagaagcccttcctcttcggccacagcctcggtggtctaactgtcatcaggtacgctgagacgcggcccgataaaatacggggattaatagcttcctcgcctgccctcgccaagagcccggaaacgccgggcttcatggtggccctcgcgaagttccttggaaagatcgccccgggagttgttctctccaacggcataaagccggaactcctctcgaggaacagggacgccgtgaggaggtacgttgaagacccactcgtccacgacaggatttcggccaagctgggaaggagcatcttcgtgaacatggagctggcccacagggaggcggacaagataaaagtcccgatcctccttctgatcggcactggcgatgtaataaccccgcctgaaggctcacgcagactcttcgaggagctggccgtcgagaacaaaaccctgagggagttcgagggggcgtaccacgagatatttgaagaccccgagtgggccgaggagttccacgaaacaattgttaagtggctggttgaaaaatcgtactcttcggctcaataa

SEQ ID NO: 964 - protein, 262 aa, Thermococcus CL-2
MEVYKAKFGEAKLGWVVLVHGLGEHSGRYGRLIKELNYAGFGVYTFDWPGHGKSPGKRGHTSVEEAMEIIDSIIEEIREKPFLFGHSLGGLTVIRYAETRPDKIRGLIASSPALAKSPETPGFMVALAKFLGKIAPGVVLSNGIKPELLSRNRDAVRRYVEDPLVHDRISAKLGRSIFVNMELAHREADKIKVPILLLIGTGDVITPPEGSRRLFEELAVENKTLREFEGAYHEIFEDPEWAEEFHETIVKWLVEKSYSSAQ

SEQ ID NO: 965 - DNA, 780 bp, Aquifex aeolicus VF-5
ttgattggcaatttgaaattgaagaggtttgaagaggttaacttagttctttcgggaggggctgccaagggtatcgcccatataggtgttttaaaagctctggaagagctcggtataaaggtaaagaggctcagcggggtaagtgctggagctatcgtttccgtcttttacgcttcgggctacactcccgacgagatgttaaaactcctgaaagaggtaaactggctcaaactttttaagttcaaaacaccgaaaatgggcttaatggggtgggagaaggctgcagagtttttggaaaaagagctcggagttaagaggctggaagacctgaacataccaacctatctttgctcggcggatctgtacacgggaaaggctctttacttcggcagaggtgacttaattcccgtgcttctcggaagttgttccatacccgggatttttgaaccagttgagtacgagaattttctacttgttgacggaggtatagtgaacaacctgcccgtagaacctttggaaaagttcaaagaacccataatcggggtagatgtgcttcccataactcaagaaagaaagattaaaaatatactccacatccttataaggagcttctttctggcggttcgttccaattcggaaaagagaaaggagttctgcaacgtagttatagaacctccccttgaagagttctctcctctggacgtaaataaggcggacgagatattcctgcggggatatgagagcactttaagaattatgagaaatttcgtaaaacattaa

SEQ ID NO: 966 - protein, 259 aa, Aquifex aeolicus VF-5
MIGNLKLKRFEEVNLVLSGGAAKGIAHIGVLKALEELGIKVKRLSGVSAGAIVSVFYASGYTPDEMLKLLKEVNWLKLFKFKTPKMGLMGWEKAAEFLEKELGVKRLEDLNIPTYLCSADLYTGKALYFGRGDLIPVLLGSCSIPGIFEPVEYENFLLVDGGIVNNLPVEPLEKFKEPIIGVDVLPITQERKIKNILHILIRSFFLAVRSNSEKRKEFCNVVIEPPLEEFSPLDVNKADEIFLRGYESTLRIMRNFVKH

SEQ ID NO: 967 - DNA, 927 bp, Archaeoglobus fulgidus VC16
atgccaatcgaccctgtttactaccagcttgctgagtatttcgacagtctgccgaagttcgaccagttttcctcggccagagagtacagggaggcgataaatcgaatatacgaggagagaaaccggcagctgagccagcatgagagggttgaaagagttgaggacaggacgattaaggggaggaacggagacatcagagtcagagtttaccagcagaagcccgattccccggttctggtttactatcacggtggtggatttgtgatttgcagcatcgagtcgcacgacgccttatgcaggagaattgcgagactttcaaactctaccgtagtctccgtggattacaggctcgctcctgagcacaagtttcccgccgcagtttatgattgctacgatgcgaccaagtgggttgctgagaacgccgaggagctgaggattgacccgtcaaaaatcttcgttgggggggacagtgcgggagggaatcttgccgcggcggtttcaataatggcgagagacagcggagaagatttcataaagcatcaaattctaatttaccccgttgtgaactttgtagcccccacaccatcgcttctggagtttggagaggggctgtggattctcgaccagaagataatgagttggttctcggagcagtacttctccagagaggaagataagttcaaccccctcgcctccgtaatctttgcggaccttgagaacctacctcctgcgctgatcataaccgccgaatacgacccgctgagagatgaaggagaagttttcgggcagatgctgagaagagccggtgttgaggcgagcatcgtcagatacagaggcgtgcttcacggattcatcaattactatcccgtgctgaaggctgcgagggatgcgataaaccagattgccgctcttcttgtgttcgactag

SEQ ID NO: 968 - protein, 308 aa, Archaeoglobus fulgidus VC16
MPIDPVYYQLAEYFDSLPKFDQFSSAREYREAINRIYEERNRQLSQHERVERVEDRTIKGRNGDIRVRVYQQKPDSPVLVYYHGGGFVICSIESHDALCRRIARLSNSTVVSVDYRLAPEHKFPAAVYDCYDATKWVAENAEELRIDPSKIFVGGDSAGGNLAAAVSIMARDSGEDFIKHQILIYPVVNFVAPTPSLLEFGEGLWILDQKIMSWFSEQYFSREEDKFNPLASVIFADLENLPPALIITAEYDPLRDEGEVFGQMLRRAGVEASIVRYRGVLHGFINYYPVLKAARDAINQIAALLVFD

SEQ ID NO: 969 - DNA, 918 bp, Sulfolobus solfataricus P1
atgcccctagatcctagaattaaaaagttactagaatcagctcttactataccaattggtaaagccccagtagaagaggtaagaaagatatttaggcaattagcgtcggcagctcccaaagtcgaagttggaaaagtagaagatataaaaataccaggcagtgaaaccgttataaacgctagagtgtattttccgaagagtagcggtccttatggtgttctagtgtatcttcatggaggcggttttgtaataggcgatgtggaatcttatgacccattatgtagagcaattacaaatgcgtgcaattgcgttgtagtatcagtggactataggttagctccagaatacaagtttccttctgcagttatcgattcatttgacgctactaattgggtttataacaatttagataaatttgatggaaagatgggagttgctattgcgggagatagtgctggaggaaatttggcagcggttgtagctcttctttcaaagggtaaaattaatttgaagtatcaaatactggtttacccagcggtaagtttagataacgtttcaagatccatgatagagtactctgatgggttcttccttaccagagagcatatagagtggttcggttctcaatacttacgaagccctgcagatttgctagactttaggttctctccaattctggcgcaagatttcaacggattacctccagccttgataataacagcagaatacgatccactaagggatcaaggagaagcgtatgcaaataaactactacaagctggagtctcagttactagtgtgagatttaacaacgttatacacggattcctctcattctttccgttgatggagcaaggaagagatgctataggtctgatagggtctgtgttaagacgagtattttatgataaaatttaa

SEQ ID NO: 970 - protein, 305 aa, Sulfolobus solfataricus P1
MPLDPRIKKLLESALTIPIGKAPVEEVRKIFRQLASAAPKVEVGKVEDIKIPGSETVINARVYFPKSSGPYGVLVYLHGGGFVIGDVESYDPLCRAITNACNCVVVSVDYRLAPEYKFPSAVIDSFDATNWVYNNLDKFDGKMGVAIAGDSAGGNLAAVVALLSKGKINLKYQILVYPAVSLDNVSRSMIEYSDGFFLTREHIEWFGSQYLRSPADLLDFRFSPILAQDFNGLPPALIITAEYDPLRDQGEAYANKLLQAGVSVTSVRFNNVIHGFLSFFPLMEQGRDAIGLIGSVLRRVFYDKI

SEQ ID NO: 971 - DNA, 906 bp, Metallosphaera prunae Ron
atgcccctacatccaaaggtaaagaaattactttcccagctacctccccaggacttctccagaaacgtgcaggacctgaggaaggcctgggatttacccttctcagggaggagggagaccctgaagagggttgaggaccttgagatacccactagggacgcacgaatcagggccagggtctacaccccctcaagtaaggaaaacttacccgtccttgtttactatcacggcggtggcttcgtgttcggtagcgttgacagctacgacggcctcgcatcccttattgccaaggaatctgggattgcggttatctccgtggagtataggctcgcccctgagcacaagttccccaccgcagtcaacgactcgtgggatgcgcttctctggatcgcggagaacggaggcaagctggggctcgacacctcgagacttgccgtggctggggatagtgctggaggaaacctgtctgccgtggtgtccctcctggacagggaccagggtaagggactggttagttatcaggtcctaatctacccagcagtgaacatggtcgataactccccatccgtcagggagtacggcgagggatacttcctcaccaggtccatgatgaactggttcgggaccatgtacttctcctctggaagggaagcggtatccccctacgcctctccagccttggctgacctacataacctcccaccctcactggtgatcactgcagagtatgatcccctaagggatcagggagagacctactctcactccctaaacgaggctggaaacgtatcaaccttggttagatatcaaggaatgattcacggcttcctgtccttctacgagtggataactgccggtaaactagccattcaccacattgctggggttctgagatctgtcctttag

SEQ ID NO: 972 - protein, 301 aa, Metallosphaera prunae Ron
MPLHPKVKKLLSQLPPQDFSRNVQDLRKAWDLPFSGRRETLKRVEDLEIPTRDARIRARVYTPSSKENLPVLVYYHGGGFVFGSVDSYDGLASLIAKESGIAVISVEYRLAPEHKFPTAVNDSWDALLWIAENGGKLGLDTSRLAVAGDSAGGNLSAVVSLLDRDQGKGLVSYQVLIYPAVNMVDNSPSVREYGEGYFLTRSMMNWFGTMYFSSGREAVSPYASPALADLHNLPPSLVITAEYDPLRDQGETYSHSLNEAGNVSTLVRYQGMIHGFLSFYEWITAGKLAIHHIAGVLRSVL

SEQ ID NO: 973 - DNA, 978 bp, Thermotoga neapolitana 5068
ttggccttcttcgatatgccccttgaggaactgaaaaattaccggcctgaaaggtacaaggagaaaaatttcgatgatttctggagggaaacacttaaagaaagcgaaggattccctctggatcccgtctttgaaaaggtggactttcatctcaaaacggttgaaacgtacgatgttactttctctggatacagggggcagagaataaagggctggcttcttgttccgaagttggcggaagaaaagcttccatgcgtcgtgcagtacataggttacaatggtggaaggggttttccacacgactggctgttctggccgtcaatgggttacatctgttttgtcatggacaccagggggcagggaagcggctggatgaagggagacacaccggattaccctgagggtccagtcgatccacagtaccccggattcatgacgaggggcattctggatccgggaacctattactacaggcgagtcttcgtggatgcggtcagggcggtggaagcagccatttccttcccgagagtggattccaggaaggtggtggtggccggaggcagtcagggtgggggaatcgcccttgcggtgagtgccctgtcgaacagggtgaaggctctgctctgcgatgtgccgtttctgtgccacttcagaagggccgtgcaacttgtcgacacacacccatacgtggagatcaccaacttcctcaaaacccacagggacaaagaggagattgttttcagaacactttcctacttcgatggtgtgaactttgcagcaagggcaaaggtgcccgccctgttttccgttgggctcatggacaccatctgtcctccctcgacggtcttcgccgcttacaaccactacgccggtccaaaggagatcagaatctatccgtacaacaaccacgaaggtggaggttctttccaggcaattgagcaggtgaaattcttgaagagactatttgaggaaggctag

SEQ ID NO: 974 - protein, 325 aa, Thermotoga neapolitana 5068
MAFFDMPLEELKNYRPERYKEKNFDDFWRETLKESEGFPLDPVFEKVDFHLKTVETYDVTFSGYRGQRIKGWLLVPKLAEEKLPCVVQYIGYNGGRGFPHDWLFWPSMGYICFVMDTRGQGSGWMKGDTPDYPEGPVDPQYPGFMTRGILDPGTYYYRRVFVDAVRAVEAAISFPRVDSRKVVVAGGSQGGGIALAVSALSNRVKALLCDVPFLCHFRRAVQLVDTHPYVEITNFLKTHRDKEEIVFRTLSYFDGVNFAARAKVPALFSVGLMDTICPPSTVFAAYNHYAGPKEIRIYPYNNHEGGGSFQAIEQVKFLKRLFEEG

SEQ ID NO: 975 - DNA, 1017 bp, Melittangium lichenicola
gtggccccgcgtggtgcaggccgtgaagaacctgcgctgagcagccggccaggcgggccctccccctcccgtcaggaggacggaccggagcgagggccccgtgtccaggcggcccgccggatgcgcaccctctccttcggtccgatgaccacagggggaagcattcacatggcgaccatggacgtgatgcgcgggccggggatgcagcggctgtcacagggcgccagggaggccgcgaaccacccctgggcgaagcgactgggccgcatgggctacgcggccaagggcgccgtgtacgccatcatcggcgtgctcgcgctgaagctcgcggcgggcgagggcggccggaccacggacagccacggcgcggtgaacaccgtggcgcacgggcccttcggcgtcgcgctgctggcggtgctggtggtgggcctgctgggctacgtggtctggaggttcgcccaggccttcgtggacacggaggacaagggctccgacgcgaagggaatcgccacgcgcgccatgtacttcctcagcggctgcatctacgcgtcgctggccctcttcgccgcgcagtccctggtgggcgccgcgcacggccggagcaaggggacgcagggctggacggccacgctgatggagcagccctttggccgcgtgctggtggcgctggtggggctgggcatcgtgggcttcgcgctgaagcagttccacaccgcgtggaaggcgaagttccgggagaagctcaccctcaccggactggctgcccggaagcagcaccacatcgagcgcatgtgccagttcggcatcgccgcgcgcggcgtggtgttcgccgtcatcggcggcttcctcgtccgctccgccgtggacgcgaaccccggcgaggccaagggcctgggagaggccctggccgtcgtcgcgaggcagccgtccggcgacgtgctcctgggggtggtggcggcgggcctggtggcctacgccgcctacctgttcctccaggcgcgctaccgcgaactctag

SEQ ID NO: 976 - protein, 338 aa, Melittangium lichenicola
MAPRGAGREEPALSSRPGGPSPSRQEDGPERGPRVQAARRMRTLSFGPMTTGGSIHMATMDVMRGPGMQRLSQGAREAANHPWAKRLGRMGYAAKGAVYAIIGVLALKLAAGEGGRTTDSHGAVNTVAHGPFGVALLAVLVVGLLGYVVWRFAQAFVDTEDKGSDAKGIATRAMYFLSGCIYASLALFAAQSLVGAAHGRSKGTQGWTATLMEQPFGRVLVALVGLGIVGFALKQFHTAWKAKFREKLTLTGLAARKQHHIERMCQFGIAARGVVFAVIGGFLVRSAVDANPGEAKGLGEALAVVARQPSGDVLLGVVAAGLVAYAAYLFLQARYREL

SEQ ID NO: 977 - DNA, 915 bp, Unknown
  Whale mat 11-801
  misc_feature (324)...(333): n = A,T,C or G
atgagcaaattcgcaatactctgggcgttgataacggcatacctgccggaacctgtgatgaaactggtatatttagggcggcgcgaaacgcttggggcacggacgcttgacgttaaagcccaagctgtcgggcggctggccaatgcaacaagacctgtcggggtgattccgacggtcgaggaaagccggaagatgacggataaagccgttagcctttttgatcagcccgcccccgaattattccgtaaaaaagacattcagattgacggggctgaagggcctattgatgcccgtatttacagcggccctgcaaaacatcgcccncgnccaatnctagtgtattttcacggcggtggctgggttcagggcaatctggacagccatgacggggtttgcggcaagctggcaaaatgggcgaactgcattgttatctcggtcgattatcgtctagcgcccgaacacaaatttccttgtgcgccgcttgatgcgattgcggcctataaatgggtgcgcgccaacgcaacaaaccttggcggcgatcctgaacgtatcggcgttggcggcgatagcgcagggggcaatcttgccgccgttgtctgccaacaaaccgccatgaacggcgagcgcacaccagatctgcaagtcctgatctatccggcgctggatgcacgcatgatctcgacctcgatggaggaattgcgtgatgcctacatcttgccgaaatccagaatggagtatttcctcggcctatatacgcgtggccctgacgatatcgaggaccttaggatgtcgccaattctcagggataccgtcgcggatcaaccccaagcctgcattgtcacctgtgggtttgaccctgcgcgacgacgggaacacctacgccgaacgcttaattgccgaggggatagacgttaa

SEQ ID NO: 978 - protein, 304 aa, Unknown
  SIGNAL (1)...(21)
  VARIANT (111): Xaa = Any Amino Acid
  Whale mat 11-801
MSKFAILWALITAYLPEPVMKLVYLGRRETLGARTLDVKAQAVGRLANATRPVGVIPTVEESRKMTDKAVSLFDQPAPELFRKKDIQIDGAEGPIDARIYSGPAKHRPRPXLVYFHGGGWVQGNLDSHDGVCGKLAKWANCIVISVDYRLAPEHKFPCAPLDAIAAYKWVRANATNLGGDPERIGVGGDSAGGNLAAVVCQQTAMNGERTPDLQVLIYPALDARMISTSMEELRDAYILPKSRMEYFLGLYTRGPDDIEDLRMSPILRDTVADQPQACIVTCGFDPARRREHLRRTLNCRGDRR

SEQ ID NO: 979 - DNA, 723 bp, Microscilla furvescens
gtgttacctatgcttacatttaatgttttatatggtatgatgaaacaaaaactagcagcaattctcatgtttttagggctatcagcagcagaggctcaagactggcctgacctacagaaatatcgtagtgctaataaagaagccaaattacttccaaaggaaaaccggaaggtggtttttatgggcaactccattacagaagcctggattagtcagcgacctgagttttttagtgaaaatgggtttatcggtcgaggcatcagtggccagacaacccctcagatgttgttgagattccgacaggatgtgatagacctgcagccaaaggctgtagtgatactagctggtaccaatgacgtagctcaaaataccgggccgatgaccattgaggaatcgcttgctaacattaagtctatggtggagctggcgcaagccaatgggatcacgcctgttttgtgtaccgtgctgcctgcagatcgtttcagctggcgacctgagcttacacccgcagaaactatcattgccctcaatcagctcattaagcaatatgccgaggcacagggcctggccctggtggattatcatgctgcactcaccaataaaggtggaggacttccggtgaaatacggagaagatggtgtgcatccaaatgtagcaggctatcaggtgatggaaaacattgttttaccggtcatttccagcgagttggcaaagctgaagtaa

SEQ ID NO: 980 - protein, 240 aa, Microscilla furvescens
  SIGNAL (1)...(32)
MLPMLTFNVLYGMMKQKLAAILMFLGLSAAEAQDWPDLQKYRSANKEAKLLPKENRKVVFMGNSITEAWISQRPEFFSENGFIGRGISGQTTPQMLLRFRQDVIDLQPKAVVILAGTNDVAQNTGPMTIEESLANIKSMVELAQANGITPVLCTVLPADRFSWRPELTPAETIIALNQLIKQYAEAQGLALVDYHAALTNKGGGLPVKYGEDGVHPNVAGYQVMENIVLPVISSELAKLK

SEQ ID NO: 981 - DNA, 978 bp, Thermotoga maritima MSB8
atggccttcttcgatttaccactcgaagaactgaagaaatatcgtccagagcggtacgaagagaaagacttcgatgagttctgggaagagacactcgcagagagcgaaaagttccccttagaccccgtcttcgagaggatggagtctcacctcaaaacagtcgaagcgtacgatgtcaccttctccggatacaggggacagaggatcaaagggtggctccttgttccaaaactggaagaagaaaaacttccctgcgttgtgcagtacataggatacaacggtggaagaggattccctcacgactggctgttctggccttctatgggttacatatgtttcgtcatggatactcgaggtcagggaagcggctggctgaaaggagacacaccggattaccctgagggtcccgttgaccctcagtatccaggattcatgacaagaggaatactggatcccagaacttactactacagacgagtcttcacggacgctgtcagagccgttgaagctgctgcttcttttcctcaggtagatcaagaaagaatcgtgatagctggaggcagtcagggtggcggaatagcccttgcggtgagcgctctctcaaagaaagcaaaggctcttctgtgcgatgtgccgtttctgtgtcacttcagaagagcagtacagcttgtggatacgcatccatacgcggagatcacgaactttctaaagacccacagagacaaggaagaaatcgtgttcaggactctttcctatttcgatggagtgaacttcgcagccagagcgaagatccctgcgctgttttctgtgggtctcatggacaacatttgtcctccttcaacggttttcgctgcctacaattactacgctggaccgaaggaaatcagaatctatccgtacaacaaccacgagggaggaggctctttccaagcggttgaacaggtgaaattcttgaaaaaactatttgagaaaggctaa

SEQ ID NO: 982 - protein, 325 aa, Thermotoga maritima MSB8
MAFFDLPLEELKKYRPERYEEKDFDEFWEETLAESEKFPLDPVFERMESHLKTVEAYDVTFSGYRGQRIKGWLLVPKLEEEKLPCVVQYIGYNGGRGFPHDWLFWPSMGYICFVMDTRGQGSGWLKGDTPDYPEGPVDPQYPGFMTRGILDPRTYYYRRVFTDAVRAVEAAASFPQVDQERIVIAGGSQGGGIALAVSALSKKAKALLCDVPFLCHFRRAVQLVDTHPYAEITNFLKTHRDKEEIVFRTLSYFDGVNFAARAKIPALFSVGLMDNICPPSTVFAAYNYYAGPKEIRIYPYNNHEGGGSFQAVEQVKFLKKLFEKG

SEQ ID NO: 983 - DNA, 1119 bp, Polyangium brachysporum
gtggtcgaacaccgacgagatcatccagccggtcacgaacgcgcagtgcggcagcagcacacggacgccggacgtgagccacaacgggctgctgtcgggacgagcgcgtctaccagcaggtgcgcgagcagctgcagtgatgcgcgcacgggcgagccgatgtgtcggcgttgcgcgcgcccgtgcccatctcatgctgctgctgctgcaacgcacaacaccttggccgaactcgccagcacaacggctgagcttgccaatgaccacaccggcgtgcaaacgcaaactggccccgctcgagagggaggcagggctgcgcggcccggcggtctcgagacacctctcgcgcatgacgagggcgcccgagggccggggcacctgcacctccatggcaaggacgaccgccacggcgcgtcgggcgcaaacaagggcatcagaccctgggtcgggattttcggatctcaatctcacgacaggagacaagacttgaagtacttcaaagcccggcttgccggcatcaccttgctcggcctgctggcctgcacctcggcctcggcgcagaccgagcccatcgtgttcgtgcacggctattccggcagcgcatccaactgggacaccatgctgggccgcttccggtcgaacggttatgcgtccggctcgctctacaccttcaactacaactcgttggtcagcagcaaccgcaccagcgccagcgagctgcgcagcttcgtcaacaccgtgcgttcgcgccacggcaacgcccgcatcgcgctggtcgcccactccaacggcgggctggtgtcgcgctggtatcgcgcggagctgggcggcgaaacggccacccgccgcttcgtgacgctgggcacgccgcaccggggcaccacctgggcctatgcgtgctacagccccgcatgtttcgagatgcgccccggctccagcttgctgaccacgctgggctcgcgtgcctgcgaccgctcgctgtggtcgaacaccgacggcatcatcctgccggcgtccagcgcgcagtgtggtgtcagcacgcgcactgccgacgtcagccatctcgacctgctgaccgactctcgcgtgtacacgcagttgcgcacgcagttgcaatga

SEQ ID NO: 984 - protein, 372 aa, Polyangium brachysporum
MVEHRRDHPAGHERAVRQQHTDAGREPQRAAVGTSASTSRCASSCSDARTGEPMCRRCARPCPSHAAAAATHNTLAELASTTAELANDHTGVQTQTGPAREGGRAARPGGLETPLAHDEGARGPGHLHLHGKDDRHGASGANKGIRPWVGIFGSQSHDRRQDLKYFKARLAGITLLGLLACTSASAQTEPIVFVHGYSGSASNWDTMLGRFRSNGYASGSLYTFNYNSLVSSNRTSASELRSFVNTVRSRHGNARIALVAHSNGGLVSRWYRAELGGETATRRFVTLGTPHRGTTWAYACYSPACFEMRPGSSLLTTLGSRACDRSLWSNTDGIILPASSAQCGVSTRTADVSHLDLLTDSRVYTQLRTQLQ

SEQ ID NO: 985 - DNA, 1575 bp, Unknown
  Obtained from environmental sample
atgcgcaaggtagtgctgctgttgatgctgctgaccgggctggcacccaccgcctgggcggccacggtcaagaccacccatcgcaccattcccagctgggatggaacgcctctcggggccttcgtcatcgaaccgcaggaagcgggcagcggacggtatccgctgctggtgatgcccagcagctgggccgtgcccagcgtggagtacgtgggcgtggcgcagtcgttggcccggcgcggctatgtggtcatcagctacagctcgcgtggcttctgggagtccggcggcagcatcgacatcgccgggccggccacggtggaggacgtcagtgcactgattgactgggcgctggacaacacccgcaccgacccgtcacgaatcggcgtatcgggcatctcctatggggccggcaccagcctgctggcggccgcacgcgatccgcgcatcaaggcagtggctgcactgagtggatgggccgacctgcaggcctcgctgtacagcaacgacacccccagcgcacagggcatcgcgctgttggttgccgcaggcctggccaccggtcgcccgggaccggagctgtccaccatcaatcgcaatgtgctggtcggcaactaccagggcgcggtggactcgctgttgccggtggcggcgcagcgcagccccggggccagcatcgatgagatcaacgccaaccagccagcggtgttcctggccaacgccttcaacgacagcctgttcccgccgggccagctggtcgatttcttcaaccgcctgaagggccccaagcagctgcagttgcgccatggcgatcacgcgctcaacgaagcctttggcgcactgggtgttcccaacgaggtctacgattcggtgggcgactggttcgaccattacctgaagggggtggccaatggcatcgaccggcagcctgcggtgcagctgaagtcgcagaagggcagctggagccactatccggattggcaggctacgcggacgggcgcggtgagctacgggctgaccgcgccgagcgggctgttgcagcccaccggtggactggtggcgaacggtggcggcgccggctggagctaccgaatcggcagcggcctgcttacggccgccaactcgggcgtggtgatggcgtccggcgcgctgcagatgatcaacctgccaccgggcgcctatgtgccgttcgtcgggcgcaacgccgcgggcgtctggcaagggccgatctactggagtgcacgccgtctggatggcgcgccggaagtgcggatgacggtcacgccaagccgcgccgacaccacgttgtatgcgtatctctatgccgaggacgtgctgggcaatggccagctgatcagccacaagccctatacgctgcggggcgccacgccggggcaggcgaagaccatcgacctgcggctggaggccagcagctgggacgtgccggccggcagtcgcctgactctggtgatggacaccgtggacctgcgctacgcaggcatcagccagttgggtggcacggtgaccttcagttcaccggcgaacgcgccttcgatgctgaagctgccgctgcattga

SEQ ID NO: 986 - protein, 524 aa, Unknown
  Obtained from environmental sample
  SIGNAL (1)...(20)
  DOMAIN (65)...(301): Prolyl oligopeptidase family
  DOMAIN (34)...(520): X-Pro dipeptidyl-peptidase (S15 family)
MRKVVLLLMLLTGLAPTAWAATVKTTHRTIPSWDGTPLGAFVIEPQEAGSGRYPLLVMPSSWAVPSVEYVGVAQSLARRGYVVISYSSRGFWESGGSIDIAGPATVEDVSALIDWALDNTRTDPSRIGVSGISYGAGTSLLAAARDPRIKAVAALSGWADLQASLYSNDTPSAQGIALLVAAGLATGRPGPELSTINRNVLVGNYQGAVDSLLPVAAQRSPGASIDEINANQPAVFLANAFNDSLFPPGQLVDFFNRLKGPKQLQLRHGDHALNEAFGALGVPNEVYDSVGDWFDHYLKGVANGIDRQPAVQLKSQKGSWSHYPDWQATRTGAVSYGLTAPSGLLQPTGGLVANGGGAGWSYRIGSGLLTAANSGVVMASGALQMINLPPGAYVPFVGRNAAGVWQGPIYWSARRLDGAPEVRMTVTPSRADTTLYAYLYAEDVLGNGQLISHKPYTLRGATPGQAKTIDLRLEASSWDVPAGSRLTLVMDTVDLRYAGISQLGGTVTFSSPANAPSMLKLPLH

SEQ ID NO: 987 - DNA, 1365 bp, Unknown
  Obtained from environmental sample
atgaaattgcaactcttaatacttttagtttttgtgatttctgttgttggagctactaaaatcagcgatcttggagaagtttatactgtgaaaactgcggacggaattacattgaaactcctgagatatcatccacccggagggcaaccaaacgctggagctcagccagttttgctattttctggattgctttgcaacatgaacgaatttgtcgtattcacaccagatggacttgaaagcaagtacaaaccctactatcctaaggaacttgcagaatgggctaaagatgatccctacatagccaaagacccgatgctctactacagtctcgcacactacctgtggaaaaaaggttacgatgtctggctgctcaactatcgtggaactggtgtaggagagatgaaaagcggtgttggcaatgcaagagttagccttgacgtctgggccctctacgatgttcctgcagcgatcgattttgtaaataaaaagactggaaaaagcctaattattggcggccacagcacgggaggacttgtaacctatgtatatttgcaaggagcaaaattcgtcaaaactccatcatgcctgataaatttggcttggtgtgaaaaagtttcggcatcagattcgcttgcagaagaaagaaacagtaagatcgttggcgtcattgcaatcgatccagcgatgattcctcctttgcccaaaatacttgatacaaaagctggatggttgcttcttgacacaccgctttacatagacttgagggacacaattgagactttagcgaagaaaaaagggctgtgggaaagtttccttttgactgagaagtttttattcgaagctatatactcgctttacaatcgctacggagagatatctgagataataaaagctctggctttcatgaatccgaacaacatgaatcctgctttgtcagacttcatgacaagatacgtagccgatagtctttacacacctacattagcccagtatgcggattttggtttaagaaatactgcaagagagtattttgaaaacggtgggaagggatatctggtcgttccaccatatcctaggcctggcgatggttactactattataaaggagagaatatgaaaaaagttaaagttccatacataactatcctctctgagcttccaggtttggttgatgcaaatcaaattataaaagacttgatgcaggctaaaacaaagcatcaactcgacagatactatataatccctggcacgggacacttagacgtagccttgggcctgaatgtcccgacagaagtctttccgaaaattggagcttggcttgatgatctgcaagaattaataggatacccaactactccgcattaa

SEQ ID NO: 988 - protein, 454 aa, Unknown; identical to SEQ ID NO: 484
  Obtained from environmental sample
  SIGNAL (1)...(17)

SEQ ID NO: 989 - DNA, 1575 bp, Unknown; identical to SEQ ID NO: 985
  Obtained from environmental sample

SEQ ID NO: 990 - protein, 524 aa, Unknown; identical to SEQ ID NO: 986
  Obtained from environmental sample
  SIGNAL (1)...(20)
  DOMAIN (65)...(301): Prolyl oligopeptidase family
  DOMAIN (34)...(520): X-Pro dipeptidyl-peptidase (S15 family)

SEQ ID NO: 991 - DNA, 1365 bp, Unknown; identical to SEQ ID NO: 987
  Obtained from environmental sample

SEQ ID NO: 992 - protein, 454 aa, Unknown; identical to SEQ ID NO: 484
  Obtained from environmental sample
  SIGNAL (1)...(17)
